(19) United States
(12) Patent Application Publication
(10) Pub. No.: US 2003/0158672 A1
(43) Pub. Date: Aug. 21, 2003

(54) Use of computationally derived protein structures of genetic polymorphisms in pharmacogenomics for drug design and clinical applications

(76) Inventors: Kalyanaraman Ramnarayan, San Diego, CA (US); Edward T. Maggio, San Diego, CA (US); P. Patrick Hess, San Clemente, CA (US)

Correspondence Address: Stephanie Seidman, Heller Ehrman White & McAuliffe LLP, 7th Floor, 4350 La Jolla Village Drive, San Diego, CA, 92122-1246, US

(21) Appl. No.: 10/271,181

(22) Filed: Oct. 10, 2002

Related U.S. Application Data
(62) Division of application No. 09/709,905, filed on Nov. 10, 2000.
Application No. 09/709,905 is a continuation-in-part of application No. 09/438,566, filed on Nov. 10, 1999, now abandoned.
Application No. 09/709,905 is a continuation-in-part of application No. 09/704,362, filed on Nov. 1, 2000.
Application No. 09/704,362 is a continuation of application No. 09/438,566, filed on Nov. 10, 1999, now abandoned.

(51) Int. Cl. G06G 7/48; G06G 7/58; G06F 19/00; G01N 33/48; G01N 33/50

(52) U.S. Cl. 702/19; 703/11; 702/20

(57) ABSTRACT

Provided herein are computer-based methods for generating and using three-dimensional (3-D) structural models of target molecules and databases containing the models. The targets can be protein structural variants derived from genes containing polymorphisms. The models are generated using molecular modeling techniques and are used in structure-based drug design studies for identifying drugs that bind to particular structural variants in structure-based drug design studies, for designing allele-specific drugs and population-specific drugs and for predicting clinical responses in patients. Computer-based methods for predicting drug resistance or sensitivity via computational phenotyping are also provided. Databases containing protein structural variant models are also provided.

### RELATED APPLICATIONS

[0001] This application is a divisional of U.S. application Ser. No. 09/709,905 to Kalyanaraman Ramnarayan, Edward T. Maggio and P. Patrick Hess, filed Nov. 10, 2000 entitled “USE OF COMPUTATIONALLY DERIVED PROTEIN STRUCTURES OF GENETIC POLYMORPHISMS IN PHARMACOGENOMICS FOR DRUG DESIGN AND CLINICAL APPLICATIONS.” U.S. application Ser. No. 09/709,905 is a continuation-in-part of U.S. application Ser. No. 09/438,566 to Kalyanaraman Ramnarayan, Edward T. Maggio and P. Patrick Hess, filed Nov. 10, 1999 entitled “USE OF COMPUTATIONALLY DERIVED PROTEIN STRUCTURES OF GENETIC POLYMORPHISMS IN PHARMACOGENOMICS FOR DRUG DESIGN AND CLINICAL APPLICATIONS”; and U.S. application Ser. No. 09/704,362 to Kalyanaraman Ramnarayan, Edward T. Maggio and P. Patrick Hess, filed Nov. 1, 2000, entitled “USE OF COMPUTATIONALLY DERIVED PROTEIN STRUCTURES OF GENETIC POLYMORPHISMS IN PHARMACOGENOMICS FOR DRUG DESIGN AND CLINICAL APPLICATIONS.” U.S. application Ser. No. 09/704,362 is a continuation of U.S. application Ser. No. 09/438,566. Priority is claimed herein to the above-noted applications, the disclosures of which are incorporated by reference herein in their entirety.

### INCORPORATION BY REFERENCE OF TABLES PROVIDED ON COMPACT DISKS

[0002] An electronic version on compact disk (CD) ROM of Tables 4 and 5, which set forth coordinates for three-dimensional structures of proteins in the database described herein is filed herewith. The contents thereof is incorporated by reference in its entirety. Table 4 is the HIV reverse transcriptase coordinates, and Table 5 is the HIV protease coordinates. The files that contain Table 4 are entitled 1906DTAB.001 and 1906DTAB.002, created on Oct. 9, 2002, and are 59,538 kilobytes and 304 kilobytes, respectively. The file that contains Table 5 is entitled 1906DTAB.003, created on Oct. 9, 2002, and contains 11,413 kilobytes.

### FIELD OF THE INVENTION

[0003] The present invention is related to computer-based methods and relational databases that use three-dimensional (3-D) protein structural models derived from genetic polymorphisms in the areas of computer-assisted drug design and the prediction of clinical responses in patients.

### BACKGROUND OF THE INVENTION

[0004] Recent advances in molecular biology, such as the discovery and identification of large numbers of genes and the sequences thereof encoded in the genomes of humans, other mammals and infectious disease agents, have contributed to the identification of a large number of proteins, biological receptors and other macromolecules and complexes that are promising therapeutic targets. Based on the information derived from the gene sequences, the three-dimensional (3-D) molecular structures of the corresponding target proteins or receptors can be determined.

[0005] Since 3-D protein structure is related to biological function, structure-based drug design is an increasingly useful methodology that has made a great impact in the design of biologically active lead compounds. Drug designers can design and screen potential new drugs via computational methods, such as docking or binding studies, before actually beginning patient testing. These experiments can be performed in silico at a tiny fraction of the clinical cost.

[0006] The resulting molecules, while serving as lead compounds, often have unpredictable effects when employed in clinical trials. In addition, it has been observed that existing drugs with known clinical efficacy far often fail to achieve beneficial results when given to particular patients, or particular subpopulations, such as ethnic groups, of patients. Genetic stratification of a population can be the difference between drug failure and drug approval. Hence there is a need to develop methods to improve the drug discovery process. Therefore, it is an object herein to provide, among a variety of benefits, methods and products that address and solve these problems. In particular, it is an object herein to provide computationally-based methods for drug design, clinical testing protocols, identification of new drug candidates and drug therapies; for predicting drug sensitivity and resistance and other methods.

### SUMMARY OF THE INVENTION

[0007] Provided herein are computer-based methods for generating and using three-dimensional (3-D) structural models of target biomolecules, particularly polymorphic and allelic variants. Also provided herein are databases that contain the sequences of such variants and also the 3-D structure of the variants for use with the methods.

[0008] Genetic polymorphisms arise, for example, as a result of gene sequence differences or as a result of post-translational modifications, including glycosylation. Hence genetic polymorphisms are manifested as gene products and proteins having variant structures. The variant structures result in differences in biological responses among the originating organisms. These differences in response, include, but are not limited to, differences among patient responses to a particular drug, effective dosage differences, and side effects. With respect to infectious organisms, some polymorphisms may arise that convey resistance or susceptibility to particular drug therapies by the altering the drug target structure.

[0009] Structural changes that arise as a result of genetic polymorphisms are not of unlimited variety, since 3-D structure impacts upon function. A knowledge of the repertoire of the fine differences among generally similar 3-D structures of particular proteins will permit design of drugs that bind to the most polymorphisms, drugs that induce the fewest side-effects, and drugs that are more effective against infectious agents. Knowledge of these structures ultimately will permit patient-specific or subpopulation-specific, such as ethnic, age, or gender groups, design or selection of drugs.

[0010] The methods that are provided are for determining and using 3-dimensional (3-D) protein structures that are derived from genetic polymorphisms to understand differences in biological activity that result from the polymorphisms, and to use this understanding to aid in the identification of potential new drug candidates and drug therapies. Also provided are methods for analyzing 3-D structures of protein structural variant targets derived from genetic polymorphisms to identify common structural features among the variants; methods for identifying structural changes in target proteins that are associated with multiple mutations arising from genetic polymorphisms and correlating this information with biological activity; and methods for using clinical data in conjunction with structural variants derived from genetic polymorphisms to understand and predict the pharmacological effects and clinical outcomes for drugs or potential drugs. Also provided are methods for generating 3-D protein structures derived from a given genotype to analyze protein-drug binding in silico to predict drug sensitivity or resistance. Also provided are databases that are used in methods provided herein and methods for generating the databases.

[0011] In particular, target biomolecules are protein structural variants encoded by genes containing genetic variations, or polymorphisms. 3-D models of the structures of proteins are determined. The models are generated using molecular modeling techniques, such as homology modeling. The resulting models are then used in the methods provided herein, which include structure-based drug design studies to design and identify drugs that bind to particular structural variants; structure-based drug design studies and to predict clinical responses in patients; and to design drugs that bind to all or a substantial portion of allelic variants of a target, to thereby increase the population of patients for whom a particular drug will be effective and/or to decrease the undesirable side-effects in a larger population.

[0012] Hence, computer-based methods of drug design based on target protein structural models derived from genetic polymorphisms are provided. The methods involve obtaining one, preferably two or more amino acid sequences of a target protein that is the product of a gene exhibiting genetic polymorphisms, where sequences represent different genetic polymorphisms, and generating 3-D protein structural variant models from the sequences. Structure-based drug design techniques are used to design potential new drug candidates or to suggest modifications to existing drugs based on predicted intermolecular interactions of the drugs or drug candidates with the models. Alternatively, drug molecules can be computationally docked with 3-D protein structural variant models based upon the sequences and energetically refined before performing structure-based drug design studies.

[0013] In preferred embodiments, binding interactions between a drug or potential new drug candidate molecule and the structural variants are calculated in order to optimize intermolecular interactions between drug or potential drug molecules and the structural variant models or to select drug therapies for patients by determining a drug or drugs that have favorable binding interactions with the structural variant models.

[0014] In other embodiments, the binding interactions are determined by calculating the free energy of binding between the protein structural variant model and a docked molecule; and decomposing the total free energy of binding based on the interacting residues in the protein active site.

[0015] After the protein structural variant models are generated, selected model structures are analyzed to determine common structural features that are conserved throughout the selected models. The conserved structural features can serve as scaffolds or pharmacophore models into which potential drugs or modified drugs are docked. For example, the selected model structures may represent the structural variants resulting from the most commonly occurring genetic polymorphisms or from genetic polymorphisms found in a specific patient subpopulation, such as a particular age group, ethnic or racial group, sex, or other subpopulation. Alternatively, the models may be selected based on clinical information, for example, the structural variants may be derived based on patients receiving a specific treatment regimen or exhibiting a particular clinical response to a given drug or on the duration of a particular drug treatment.

[0016] The methods provided herein can be used for predicting clinical responses in patients based on genetic polymorphisms. For example, a structural variant model derived from a subject, such as a human patient, exhibiting a particular genetic polymorphism is generated and screened against a number of reference protein structural variant models derived from genetic polymorphisms of the same gene in other such subjects. In certain embodiments, the reference structures are stored in a database, preferably with observed clinical data associated with the structures, or polymorphisms. The structural variant model from the subject is compared to a reference structures, for example, by database searching, in order to identify reference structural variants that are similar to the model structure derived from the subject. Based on the premise that structurally similar targets will have similar clinical responses, a clinical outcome can be predicted for the patient based on the structures identified through structural comparison or database searching. This information can also be used in the design and analysis of clinical trials; it can also be used for selecting appropriate therapies for a subject in instances in which the subject is a patient and the protein is a drug target.

[0017] The methods are also used to design therapeutic agents that are active against biological targets that have become drug resistant, particularly due to genetic mutations. In certain embodiments, 3-D protein structural variant models are generated for a target protein in which genetic mutations have occurred and against which a given drug is no longer biologically active. The models are compared to 3-D protein structural variant models of the target protein against which the drug has biological activity in order to identify structural differences between the susceptible and resistant targets. The differences can be used to understand the structural contributions to drug resistance, and this information can be utilized in structure-based drug design calculations to identify new drugs or modifications to the existing drug that circumvent the resistance problem.

[0018] A computer-based method for identifying compensatory mutations in a target protein is also provided. The method involves obtaining the amino acid sequence of a target protein containing multiple amino acid mutations that is expressed in a patient, where the structure of a form of the target protein that responds to a particular drug, including the active site, has been structurally characterized; generating a 3-D structural model of the mutated protein; comparing the structure of the mutated protein with the form of the protein that responds to the drug to identify structural differences and/or similarities arising from the mutations; comparing the biological activities of the drug against the mutated protein and the form of the protein that responds to the drug to determine the effects of the mutations on drug response; and identifying the mutations in the protein that affect biological activity based on the comparisons. The target biolmolecules can also be used in a method referred to herein as computational phenotyping to predict drug sensitivity or resistance for a given genotype. These computer-based method for identifying phenotypes in silico are provided. The methods involve obtaining from a patient/specimen, such as a body fluid or tissue sample, including blood, cerebral spinal fluid, urine, saliva, sweat and tissue samples, the amino acid sequence of a target protein; generating a 3-D structural model of the target protein; performing protein-drug binding analyses; and predicting drug sensitivity or resistance based on the protein-drug binding analyses.

[0019] Molecular structure databases containing protein structural variant models produced by the methods are also provided. The databases may also contain biological or clinical data associated with the structural variants. The databases can be interfaced to a molecular graphics package for visualization and analysis of the 3-D molecular structural models. In particular, databases containing the 3-D structures of polymorphic variants of selected target genes, particularly pharmaceutically significant genes with pharmaceutically significant gene products, such as proteases and polymerases, including reverse transcriptases, and receptors, such as cell surface receptors, are provided. The databases may be stored an provided on any suitable medium, including, but are not limited to, floppy disks, hard drives, CD-ROMS and DVDs.

[0020] Also provided are relational databases for managing and using information relating to genetic polymorphisms. The databases contain 3-D molecular coordinates for structural variants derived from genetic polymorphism, a molecular graphics interface for 3-D molecular structure visualization, computer functionality for protein sequence and structural analyses and database searching tools. The databases may further include observed clinical data associated with the genetic polymorphism. The databases provide a means to design the allele-specific drugs and also to identify among alleles common or conserved structural features that can serve as the target for drug design.

[0021] The databases can also be used for identification of invariant residues and regions of a target biomoleucle, such as an HIV protease or reverse transcriptase. The identified invariant regions are then used to computationally screen compounds, preferably small molecules by assessing binding interactions. The compounds so-identified serve as candidates for drugs that will be effective for a larger proporation of a population or against a broader range of variants of a pathogen, where the target protein is from a pathogens.

[0022] Systems, including computers, containing the databases also are provided herein. Any computer known to those of skill in the art for maintaining such databases is contemplated. User interfaces for accessing and manipulating the databases and content thereof are also provided.

### BRIEF DESCRIPTION OF THE DRAWINGS

[0023] FIG. 1 illustrates a method for creating a protein structural variant relational database.

[0024] FIG. 2 is a flow chart that describes one method used to generate structural variant models derived from genetic polymorphisms and to use the models in structure-based drug design studies.

[0025] FIG. 3 is a flow chart that describes an alternative method used to generate structural variant models derived from genetic polymorphisms and to use the models in structure-based drug design studies.

[0026] FIG. 4 shows the correlation between experimental and calculated changes of binding energy upon ligand modifications in the binding site of NS3.

[0027] FIG. 5 shows a comparison of calculated versus experimental binding free energy changes for complexes of the tumor necrosis factor (TNF) receptor with different inhibitors.

[0028] FIG. 6 shows the HIV PR inhibitors approved by the FDA.

[0029] FIG. 7 shows the frequency versus amino acid residue plot of HIV PR.

[0030] FIG. 8 shows frequency analysis of 10591 HIV PR Sequences, where ResNum is the residue number; TotOcc is the total occurrence of the mutation; Dist is the distance of the mutating residue from approximate center of active site (Asp28); WtAA is the amino acid in the wild type protein; NumMut is the number of mutations; and MutList is a list of amino acid mutations.

[0031] FIG. 9 is a block diagram of an exemplary computer.

[0032] FIG. 10 is a graphical representation of a relational database.

[0033] FIG. 11 is a tabulation of the 3-D coordinates of a representative entry in a database that includes 3-D structures.

### DETAILED DESCRIPTION OF THE INVENTION

[0034] A. Definitions

[0035] B. Computer-based methods of drug design based on genetic polymorphisms

[0036] 1. Methods for obtaining amino acid sequences of a target protein

[0037] 2. Generation of 3-D protein structural variant models

[0038] a. Homology Modeling

[0039] b. Ab initio generation of 3-D structures

[0040] c. Crystal structures

[0041] 3. Use of 3-D structural variant models in drug design

[0042] a. Selection of relevant structural variants

[0043] b. Drug design

[0044] c. Computational docking

[0045] d. Free energy of binding studies

[0046] C. Applications of computer-based methods

[0047] 1. Genetic polymorphisms and structure-based drug design

[0048] 2. Drug resistance

[0049] 3. Identification of conserved structural features or pharmacophores

[0050] 4. Identification of compensatory structural changes

[0051] 5. Clinical Applications

[0052] D. Creation of 3-D Structural Polymorphism Databases

[0053] 1. Exemplary Databases and generation thereof

[0054] 2. Computer systems and Database

[0055] E. Computational phenotyping

### A. Definitions

[0056] Unless defined otherwise, all technical and scientific terms used herein have the same meaning as is commonly understood by one of skill in the art to which this invention belongs. All patents, patent applications, published patent applications and publications referred to herein are, unless noted otherwise, incorporated by reference in their entirety. In the event a definition in this section is not consistent with definitions elsewhere, the definition set forth in this section will control.

[0057] As used herein, polymorphism refers to a variation in the sequence of a gene in the genome amongst a population, such as allelic variations and other variations that arise or are observed. Genetic polymorphisms refers to the variant forms of gene sequences that can arise as a result of nucleotide base pair differences, alternative mRNA splicing or post-translational modifications, including, for example, glycosylation. Thus, a polymorphism refers to the occurrence of two or more genetically determined alternative sequences or alleles in a population. These differences can occur in coding and non-coding portions of the genome, and can be manifested or detected as differences in nucleic acid sequences, gene expression, including, for example transcription, processing, translation, transport, protein processing, trafficking, DNA synthesis, expressed proteins, other gene products or products of biochemical pathways or in post-translational modifications and any other differences manifested among members of a population. A single nucleotide polymorphism (SNP) refers to a polymorphism that arises as the result of a single base change, such as an insertion, deletion or change in a base.

[0058] A polymorphic marker or site is the locus at which divergence occurs. Such site may be as small as one base pair (an SNP). Polymorphic markers include, but are not limited to, restriction fragment length polymorphisms, variable number of tandem repeats (VNTR's), hypervariable regions, minisatellites, dinucleotide repeats, trinucleotide repeats, tetranucleotide repeats and other repeating patterns, simple sequence repeats and insertional elements, such as Alu. Polymorphic forms also are manifested as different mendelian alleles for a gene. Polymorphisms may be observed by differences in proteins, protein modifications, RNA expression modification, DNA and RNA methylation, regulatory factors that alter gene expression and DNA replication, and any other manifestation of alterations in genomic nucleic acid or organelle nucleic acids.

[0059] As used herein, structural variant proteins refer the variety of 3-D molecular structures or models thereof that result from the polymorphisms. These variants typically arise from transcription and translation of genes containing genetic polymorphisms, but also include diffentially glyosylated or otherwise post-translationally modified variants that potentially exhibit differential interactions with drugs and drug candidates.

[0060] As used herein, binding interactions refer to atomic or physical interactions between molecules including, but not limited to binding free energy, hydrophobic interactions, electrostatic interactions, steric interactions and other interactions that are commonly considered by those of skill in the art to determine the affinity of one molecule to bind to another. Favorable binding interactions refer to binding interactions that promote physical or chemical associations between molecules.

[0061] As used herein, a target protein is defined as a protein that is a receptor with which drugs or other ligands, such as small molecule or peptide agonists or antagonists or other proteins or biomacromolecules, such as DNA or RNA, interact to bring about a biological response.

[0062] As used herein, structure-based drug design refers to computer-based methods in which 3-D coordinates for molecular structures are used to identify potential drugs that can interact with a biological receptor. Examples of such methods include, but are not limited to, searching of small molecule libraries or databases, conformational searching of a ligand within an active site of identify biologically active conformations or computational docking methods.

[0063] As used herein, pharmacogenomics refers to study of the variability of patient responses to drugs due to inherent genetic differences.

[0064] As used herein, computational docking refers to techniques wherein molecules, for example, a ligand and receptor or active site, are fitted together based on complementary interactions, for example, steric, hydrophobic or electrostatic interactions.

[0065] As used herein, energetic refinement refers to the use of molecular mechanics simulation techniques, such as energy minimization or molecular dynamics, or other techniques, such as quantum-based approaches, to “adjust” the coordinates of a molecular structural model to bring it into a stable, low energy, conformation. In molecular mechanics simulations, the potential energy of a molecular system is represented as a function of its atomic coordinates along with a set of atomic parameters, called a forcefield. Energy minimization refers to a method wherein the coordinates of a molecular conformation are adjusted according to a target function to result in a lower energy conformation. Molecular dynamics refers to methods for simulating molecular motion by inputting kinetic energy into the molecular system corresponding to a specified temperature, and integrating the classical equations of motion for the molecular system. During a molecular dynamics simulation, a system undergoes conformational changes so that different parts of its accessible phase space are explored.

[0066] As used herein, clinical data refers to information obtained from patients pertaining to pharmacological responses of the patient to a given drug, including, but not limited to efficacy data, side effects, resistance or susceptibility to drug therapy, pharmacokinetics or clinical trial results.

[0067] As used herein, patient histories, include medical histories and other any information, such as parental medical histories, dates and places of birth of the patient and parents, number of siblings, number of children and other such data.

[0068] As used herein, compensatory mutations are mutations that act in concert with active site mutations by compensating for functional deficits caused by changes or mutations that affect binding in the active site.

[0069] As used herein, a relational database is a collection of data items organized as a set of formally-described tables from which data can be accessed or reassembled in many different ways without having to reorganize the database tables. Such databases are readily available commercially, for example, from Oracle, IBM, Microsoft, Sybase, Computer Associates, SAP, or multiple other vendors.

[0070] As used herein, a phenotype refers to a set of parameters that includes any distinguishable trait of an organism. A phenotype can be physical traits and can be, in instances in which the subject is an animal, a mental trait, such as emotional traits. Some phenotypes can be determined by observation elicited by questionnaires or by referring to prior medical and other records. For purposes herein, a phenotype is a parameter around which the database can be sorted.

[0071] As used herein, genotype refers to a specific gene or totality of genetic information in a specific cell or organism.

[0072] As used herein, haplotype refers refers to two or more polymorphism located on a single DNA strand. Hence, haplotyping refers to identification of two or more polymorphisms on a single DNA strand. Haplotypes can be indicative of a phenotype.

[0073] As used herein, a parameter is any input data that will serve as a basis for sorting the database. These parameters will include phenotypic traits, medical histories, family histories and any other such information elicited from a subject or observed about the subject. A parameter may describe the subject, some historical or current environmental or social influence experienced by the subject, or a condition or environmental influence on someone related to the subject. Paramaters include, but are not limited to, any of those described herein, and known to those of skill in the art.

[0074] As used herein, computational phenotyping, refers to computer-based processes that assess the phenotype resulting from a particular genotype. The phenotype describes observables, such as, but are not limited to, the structure of the encoded protein, its functional morphological and structural attributes. In particular, as contemplated herein, the phenotype that is assesed is the interaction of a protein with a particular compounds, particularly a drug. As exemplified herein, the method provides a means to select an effective drug for a particular subjects, particularly mammals, or class thereof.

[0075] As used herein, a database refers to a collection of data; in this case data relating to polymorphic variants. Hence a database contains the nucleic acid sequences encoding the variants, or a portion of the variant, such as a portion contianing the active site or targeted site. Additionally, the database may contain other information related to each entry, including but are not limited to, the corresponding 3-D structure of the encoded protein (or a portion thereof) and information regarding the source of each sequence. Some of the entries in a database may be identical, and for purposes herein, a database contains at least 2 different entries, typically far more than 2 entries. The number of entries depends upon the protein of interest and variety and number of polymorphisms that exist. Generally a database will have at least 10 different entries, typically more than 100, more than 500, more than 1000, more than 2000, 3000, 4000, 5000, 8000, 10,000, 50,000, 100,000 and greater. Databases herein containing 20,000 entries and more have been generated and are exemplified herein.

[0076] As used herein, a relational database stores information in a form representative of matrices, such as two-dimensional tables, including rows and columns of data, or higher dimensional matrices. For example, in one embodiment, the relational database has separate tables each with a parameter. The tables are linked with a record number, which also acts as an index. The database can be searched or sorted by using data in the tables and is stored in any suitable storage medium, such as floppy disk, CD rom disk, hard drive or other suitable medium.

[0077] As used herein, a profile refers to information relating to, but not limited to and not necessarily including all of, age, sex, ethnicity, disease history, family history, phenotypic characteristics, such as height and weight and other relevant parameters.

[0078] As used herein, a biopolymer includes, but is not limited to, nucleic acid, proteins, polysaccharides, lipids and other macromolecules. Nucleic acids include DNA, RNA, and fragments thereof. Nucleic acids may be derived from genomic DNA, RNA, mitochondrial nucleic acid, chloroplast nucleic acid and other organelles with separate genetic material.

[0079] As used herein, a DNA or nucleic acid homolog refers to a nucleic acid that includes a preselected conserved nucleotide sequence. By the term “substantially homologous” is meant having at least 80%, preferably at least 90%, most preferably at least 95% homology therewith or a less percentage of homology or identity and conserved biological activity or function.

[0080] As used herein, a receptor refers to a molecule that has an affinity for a given ligand. Receptors may be naturally-occurring or synthetic molecules. Receptors may also be referred to in the art as anti-ligands. As used herein, the terms, receptor and anti-ligand are interchangeable. Receptors can be used in their unaltered state or as aggregates with other species. Receptors may be attached, covalently or noncovalently, or in physical contact with, to a binding member, either directly or indirectly via a specific binding substance or linker. Examples of receptors, include, but are not limited to: antibodies, cell membrane receptors surface receptors and internalizing receptors, monoclonal antibodies and antisera reactive with specific antigenic determinants (such as on viruses, cells, or other materials), drugs, polynucleotides, nucleic acids, peptides, cofactors, lectins, sugars, polysaccharides, cells, cellular membranes, and organelles.

[0081] Examples of receptors and applications using such receptors, include but are not restricted to:

[0082] a) enzymes: specific transport proteins or enzymes essential to survival of microorganisms, which could serve as targets for antibiotic (ligand) selection;

[0083] b) antibodies: identification of a ligand-binding site on the antibody molecule that combines with the epitope of an antigen of interest may be investigated; determination of a sequence that mimics an antigenic epitope may lead to the development of vaccines of which the immunogen is based on one or more of such sequences or lead to the development of related diagnostic agents or compounds useful in therapeutic treatments such as for auto-immune diseases;

[0084] c) nucleic acids: identification of ligand, such as protein or RNA, binding sites;

[0085] d) catalytic polypeptides: polymers, preferably polypeptides, that are capable of promoting a chemical reaction involving the conversion of one or more reactants to one or more products; such polypeptides generally include a binding site specific for at least one reactant or reaction intermediate and an active functionality proximate to the binding site, in which the functionality is capable of chemically modifying the bound reactant (see, e.g., U.S. Pat. No. 5,215,899);

[0086] e) hormone receptors: determination of the ligands that bind with high affinity to a receptor is useful in the development of hormone replacement therapies; for example, identification of ligands that bind to such receptors may lead to the development of drugs to control blood pressure; and

[0087] f) opiate receptors: determination of ligands that bind to the opiate receptors in the brain is useful in the development of less-addictive replacements for morphine and related drugs.

[0088] As used herein, prion refers to an infectious pathogen that causes central nervous system spongiform encephalopathies in humans and animals. No nucleic acid component is necessary for the infectivity of prion protein (see, e.g., U.S. Pat. No. 5,808,969).

[0089] As used herein, a ligand is a molecule that is specifically recognized by a particular receptor. Examples of ligands, include, but are not limited to, agonists and antagonists for cell membrane receptors, toxins and venoms, viral epitopes, hormones (e.g., steroids), hormone receptors, opiates, peptides, enzymes, enzyme substrates, cofactors, drugs, lectins, sugars, oligonucleotides, nucleic acids, oligosaccharides, proteins, and monoclonal antibodies.

[0090] As used herein, complementary refers to the topological compatibility or matching together of interacting surfaces of a ligand molecule and its receptor. Thus, the receptor and its ligand can be described as complementary, and furthermore, the contact surface characteristics are complementary to each other.

[0091] As used herein, a ligand-receptor pair or complex formed when two macromolecules have combined through molecular recognition to form a complex.

[0092] The terms “homology” and “identity” are often used interchangeably. In this regard, percent homology or identity may be determined, for example, by comparing sequence information using a GAP computer program. The GAP program utilizes the alignment method of Needleman and Wunsch (J. Mol. Biol. 48:443 (1970), as revised by Smith and Waterman (Adv. Appl. Math. 2:482 (1981). Briefly, the GAP program defines similarity as the number of aligned symbols (i.e., nucleotides or amino acids) which are similar, divided by the total number of symbols in the shorter of the two sequences. The preferred default parameters for the GAP program may include: (1) a unary comparison matrix (containing a value of 1 for identities and 0 for non-identities) and the weighted comparison matrix of Gribskov and Burgess, Nucl. Acids Res. 14:6745 (1986), as described by Schwartz and Dayhoff, eds., ATLAS OF PROTEIN SEQUENCE AND STRUCTURE, National Biomedical Research Foundation, pp. 353-358 (1979); (2) a penalty of 3.0 for each gap and an additional 0.10 penalty for each symbol in each gap; and (3) no penalty for end gaps.

[0093] Whether any two nucleic acid molecules have nucleotide sequences that are at least 80%, 85%, 90%, 95%, 96%, 97%, 98% or 99% “identical” can be determined using known computer algorithms such as the “FAST A” program, using for example, the default parameters as in Pearson and Lipman, Proc. Natl. Acad. Sci. USA 85:2444 (1988). Alternatively the BLAST function of the National Center for Biotechnology Information database may be used to determine identity In general, sequences are aligned so that the highest order match is obtained. “Identity” per se has an art-recognized meaning and can be calculated using published techniques. (See, e.g.: Computational Molecular Biology, Lesk, A. M., ed., Oxford University Press, New York, 1988; Biocomputing: Informatics and Genome Projects, Smith, D. W., ed., Academic Press, New York, 1993; Computer Analysis of Sequence Data, Part I, Griffin, A. M., and Griffin, H. G., eds., Humana Press, New Jersey, 1994; Sequence Analysis in Molecular Biology, von Heinje, G., Academic Press, 1987; and Sequence Analysis Primer, Gribskov, M. and Devereux, J., eds., M Stockton Press, New York, 1991). While there exist a number of methods to measure identity between two polynucleotide or polypeptide sequences, the term “identity” is well known to skilled artisans (Carillo, H. & Lipman, D., SIAM J Applied Math 48:1073 (1988)). Methods commonly employed to determine identity or similarity between two sequences include, but are not limited to, those disclosed in Guide to Human Genome Computing, Martin J. Bishop, ed., Academic Press, San Diego, 1998, and Carillo, H. & Lipman, D., SIAM J Applied Math 48:1073 (1988). Methods to determine identity and similarity are codified in computer programs. Preferred computer program methods to determine identity and similarity between two sequences include, but are not limited to, GCG program package (Devereux, J., et al., Nucleic Acids Research 12(I):387 (1984)), BLASTP, BLASTN, FASTA (Atschul, S. F., et al., J Molec Biol 215:403 (1990)).

[0094] Therefore, as used herein, the term “identity” represents a comparison between a test and a reference polypeptide or polynucleotide. For example, a test polypeptide may be defined as any polypeptide that is 90% or more identical to a reference polypeptide.

[0095] As used herein, the term at least “90% identical to” refers to percent identities from 90 to 99.99 relative to a reference polypeptide. Identity at a level of 90% or more is indicative of the fact that, assuming for exemplification purposes a test and reference polynucleotide length of 100 amino acids are compared. No more than 10% (i.e., 10 out of 100) amino acids in the test polypeptide differs from that of the reference polypeptides. Similar comparisons may be made between a test and reference polynucleotides. Such differences may be represented as point mutations randomly distributed over the entire length of an amino acid sequence or they may be clustered in one or more locations of varying length up to the maximum allowable, e.g. 10/100 amino acid difference (approximately 90% identity). Differences are defined as nucleic acid or amino acid substitutions, or deletions.

[0096] As used herein, AMBER is a force field well known in the arts and designed for the study of proteins and nucleic acids as defined in Weiner et al. J. Comput. Chem. (1986) 7:230-252, where a modified AMBER (version 3.3) force field is a fully vectorized version of AMBER (version 3.0) with coordinate coupling, intra/inter decomposition, and the option to include the polarization energy as part of the total energy. AMBER is available in commercially available molecular modeling programs such as, but not limited to, Macromodel (Columbia University).

[0097] As used herein, ECEPP (Empirical Conformational Energies of Peptides Program) is a force field well know in the arts (U.S. Pat. Nos. 5,910,478; 5,846,763). ECEPP/3 refers to version 3 of this well known force field.

[0098] As used herein, QSAR refers to quantitative structure-activity relationship.

[0099] As used herein, vdw refers to van der Waals.

[0100] As used herein, RMSD refers to root mean-squared deviation.

[0101] As used herein, medical history refers to the parameters and data typically obtained by a physician when examining a subject or other such professional when examining other mammals, and includes such information as prior diseases, age, weight, height, sex and other information. For purposes, the subjects that serve as the source of the samples from which nucleic acids encoding polymorphisms are isolated, include animals, plants, pathogens and any organism that has nucleic acid that exhibits polymorphism. In this context medical history refers to information pertinent to the particular organism.

[0102] As used herein, subject history, refers to data such as locale in which the subject was born, raised or resident or visited, and parental history and other such information.

[0103] As used herein, a drug is an agent that binds to or interacts with a targeted protein. For purposes, a therapeutic agent is a drug.

### B. Computer-Based Methods of Drug Design Based on Genetic Polymorphisms

[0104] Methods for computer-based drug design based on genetic poly-morphisms are provided. The methods includes the steps of obtaining one or more, preferably two or more, amino acid sequences of a target protein that is the product of a gene exhibiting genetic polymorphisms; generating 3-dimensional (3-D) protein structural variant models of all or a portion of the protein from the sequences; and based upon the structures of the 3-D models, designing drug candidates or modifying existing drugs based on the predicted intermolecular interactions of the drug candidates or modified drugs with the structural variants or portions thereof by computationally docking drug molecules with the target protein models; and then, optionally energetically refining the docked complexes; determining the binding interactions between the drug or potential new drug candidate molecules and the models by calculating the free energy of binding of the docked complexes and decomposing the total free energy of binding based on interacting residues in the protein active site or sites deemed important for protein activity.

[0105] A variety of methods that include these steps are provided. Such methods have particular application, for example, in predicting patient responses. As noted, patients exhibit variable responses to drugs. For some patients a drug may be very beneficial and achieve a desired response; whereas for other patients, with the same disorder, the same drug will have little or no effect. It is known that individuals as well as groups of individuals exhibit a variety of genetic polymorphisms. As described herein, the presence or absence of such polymorphisms can be correlated with the variability of patient responses to drugs.

[0106] It is shown herein that by understanding how genetic poly-morphisms affect 3-D protein structure of a drug target, for example, it is possible to ascertain the interaction of a particular drug with the target in a particular patient or groups of patients. Based upon this interaction, the outcome can be predicted. It will be possible to determine whether a patient will benefit from a drug or be at risk for a particular side effect. It is possible to predict these responses before exposure to the drug. These methods also permit rational design of drugs that can treat various populations or ultimately even individuals. These differences and effects can also be taken into account to design drugs that are not dependent upon a particular polymorphism.

[0107] Hence, the knowledge derived from understanding the effects of genetic polymorphisms can be used to develop and apply therapeutics more effectively, make clinical trials more successful, for example, by permitting selection of test subjects with the same polymorphism or with polymorphisms for which the drug is designed to interact effectively.

[0108] It is shown herein that it is advantageous to use 3-D molecular structures in drug design rather than to consider primary sequence alone. For example, most drugs target proteins either in the afflicted organism or in a pathogen. Disease, drug action and toxicity are all manifested at the protein level. Although the nucleotide sequences of genetic polymorphisms might appear to be quite different, the resulting protein targets may have similar shapes and, therefore, the protein biological function might be the same. Conversely, although genetic polymorphism sequences might appear similar, the resulting proteins may have critical differences in their 3-D structures that greatly affect biological activity. Thus, use of 3-D protein structure models in such methods provide advantages not heretofor realized. Methods for generating 3-D structures are known to those of skill in the art and are also provided herein.

[0109] Once the protein target structural models have been selected, structure-based drug discovery methodologies, for example, computational screening or docking programs and methods (e.g., DOCK (available from University of Ca, San Francisco; and AUTODOCK available from Scripps Research Institute, La Jolla), are used to design biologically-active compounds based on the 3-D structures of the biomolecular receptors. Using these methods, drug designers can identify and computationally rank the various potential clinical drug candidates for maximum efficacy, thereby performing drug discovery in silico and avoiding the tedious time and expense associated with in vitro drug discovery methods.

[0110] In addition to drug design applications, the information derived from studying the structures of biological targets can be used to understand and predict biological responses in patients, such as efficacy, toxicity, drug resistance and other pharmacological effects. Since human clinical trials may cost upwards of $100-300 million, it is desirable to predict the outcome to the greatest extent possible for each prospective drug candidate so that the best prospective drug candidates are advanced to clinical trials. As described below, methods are provided herein for selecting populations for clinical trials.

[0111] 1. Methods for Obtaining Amino Acid Sequences of a Target Protein

[0112] Any protein or gene or encoded mRNA that exhibits polymorphisms, herein referred to as the target protein, in structure is contemplated for use herein and for generating the databases as provided herein. The target protein is a protein, polypeptide, or oligopeptide that includes, but is not limited to, receptors, enzymes, hormones, prions, or any such compound with which drugs or other ligands, such as small molecules, peptide agonists, peptide antagonists, other proteins, nucleic acids and other biomacromolecules, interact to bring about a biological response. These target proteins occur in any organism, including plants and animals, eukaryotes and prokaryotes, including pathogens, such as protozoans, parasites, viruses, including DNA and retroviruses, and bacteria. The protein or gene can be one expressed in the organism, such as molecule targeted for drug interaction, or one expressed in a pathogen.

[0113] The target gene is one that exhibits polymorphisms (i.e., sequence variations among a population) and the target protein is the product of a gene exhibiting genetic polymorphisms, or sequence variations, as described herein. Any gene or protein that exhibits polymorphisms is contemplated herein. In particular, genes that encode proteins, polypeptides, or oligopeptides that are targets for drug interaction are contemplated herein. The genetic polymorphisms can occur in the genes of pathogens (e.g. viruses, bacteriae, and fungi), parasites, plants, animals, and humans. As such, the sequence a target protein can be obtained by the isolation and analysis of the gene or gene product in samples taken from pathogens, parasites, plants, animals, and humans, most preferably from humans.

[0114] The genes or proteins may be isolated from any source, such as animal or plant specimens, or the sequences obtained from any source, including known databases. If starting with gene sequences that include single or multiple nucleotide polymorphisms, the amino acid sequences of the translated proteins can be determined. Protein isolation and sequencing methods are well known to those of skill in the art. Alternatively, samples of the target protein can be obtained and sequenced directly from specimens. Multiple sequence analyses can be performed to determine the exact amino acid variations or mutations resulting from the genetic polymorphisms.

[0115] Amino acid sequences of target proteins can also be obtained from data banks and databases (e.g. GenBank, Swiss Prot, PIR) and from publications and other sources in which numerous polymorphisms have been identified and mapped. Samples may be obtained from, for example blood and tissue banks, nucleic acid isolated, genes selected or identified and polymorphims can be mapped from such samples.

[0116] 2. Generation of 3-D Protein Structural Variant Models

[0117] After the amino acid sequences of target proteins are obtained via the means described in section 1, the 3-D structural models of the sequences of native proteins or of the protein structural variants are then determined. They can be determined through experimental methods, such as x-ray crystallography and NMR, and from structure databases, such as the Protein Databank (PDB). Moreover, 3-D structural models can be determined by using any of a number of well known techniques for predicting protein structures from primary sequences (e.g. SYBYL (Tripos Associated, St. Louis, Mo.), de novo protein structure design programs (e.g. MODELER (MSI, Inc., San Diego, Calif.) and MOE (Chemical Computing Group, Montreal Canada) and ab initio methods, see, e.g., U.S. Pat. Nos. 5,331,573, 5,579,250 and 5,612,895), homology modeling, and ab initio computational analysis. Homology modeling, structure determination based upon x-ray crystallographic structures, and ab initio techniques and combinations of these methods are among those preferred herein.

[0118] a. Homology Modeling

[0119] Homology modeling is based on the relationship between protein evolutionary origin, function and folding patterns. Proteins of related origin and function have conserved sequences and structural features among the members of a homologous family. Using these relationships, a three-dimensional structural model for a protein of unknown structure can be constructed by using composite parts of related proteins in the same family. Where only the primary amino acid sequence of a target protein is known, the sequence can be compared to the sequences of related proteins with known structures (reference proteins), and a model can be built by incorporating the structural attributes of the reference protein together with the sequence of the target protein.

[0120] Sequence homology calculations generally require: the amino acid sequence of the target protein; a high resolution structure for at least one, but preferably more, related reference proteins; and any other related amino acid sequences. The reference proteins include structures which are similar to the target protein, either by sequence, fold, function, or which are polymorphisms of the target protein. The more related protein structures and sequences that are available or determined, the more reliable the technique will be at providing an accurate model.

[0121] In constructing a protein model using homology modeling, sequence alignment is performed between the target sequence and any known structures within the protein family. Sequence alignment requires determining the similarity between protein sequences by maximizing the number of matches between the sequences while introducing the minimum number of insertions and deletions. Sequence alignment algorithms are well known in the art, and standard gap penalties (i.e., programs that automatically introduce gaps to maximize alignment and then adjust the percentage of identity by applying penalties for gap number and gap length) and other parameters can be selected by the skilled artisan. Additionally, the 3-D structures of the known reference proteins, preferably, are aligned to give the best overall fit for the proteins in the family. This provides indication of structurally-conserved regions, such as regions of the proteins that do not contain insertions or deletions, among the reference structures.

[0122] Once the sequences are aligned and the structurally-conserved regions are identified, the coordinates of the reference proteins can be used to construct a 3-D model of the target structure. Coordinates from the protein backbone of the reference proteins are then used to construct the backbone framework for the target protein structure. Side chains can be constructed,.for example, by using side chain coordinates from the reference proteins, searching from a database to obtain side chain conformations that fit in with the existing structural framework or by generating side chains ab initio to establish energetically favorable side chain conformations.

[0123] The non-conserved regions of the unknown protein can be constructed, for example, using database searching. A database of known protein structures (e.g., PDB) can be searched to identify variable regions in other proteins that have a high degree of sequence similarity to the target sequence and that fit onto the existing structural framework of the protein model. Algorithms for performing sequence similarity matching and homology model building are well known in the art and are available commercially (available from Molecular Simulations, Inc., Tripos, Inc. and from numerous academic sources).

[0124] The variable regions can also be modeled by fitting the target sequence to a peptide backbone generated by varying phi and psi angles (e.g., by calculating Ramachandran or Balasubramanian plots, see, Balasubramanian (1974) “New type of representation for Mapping Chain Folding in Protein Molecules,” Nature 266:856-857) or Balaji plots, see, U.S. Pat. Nos. 5,331,573, 5,579,250 and 5,612,895) of the amino acids to give a loop structure that can be integrated into the model structure based on a sterically and energetically reasonable fit (FIG. 1).

[0125] In a Balasubramanian plot, the peptide is depicted as a series of different vertical lines, each having solid dots and open circles aligned with the corresponding φ, ψ angle values on the vertical axis, and where each line corresponds to the particular number of the residue having the plotted φ, ψ angles as indicated on a horizontal axis. In the Balaji plot, the values of the φ, ψ angles are shown as the base and tip of a vertical wedge (assuming a vertical angular axis), respectively, with a separate wedge being horizontally positioned on the plot as a function of the residue number of the φ, ψ angles plotted. The Balaji plot replaces the solid dots and open circles of the Balasubramanian Plot with the base of a wedge and the tip of a wedge, respectively; and further replaces the vertical line joining the dots and open circles of the Balasubramanian plot with the body of the wedge.

[0126] b. Ab Initio Generation of 3-D Structures

[0127] Alternatively, ab initio methods can be used in combination with an existing partial homologous structure to generate unresolved portions of the target structure. Such methods are described, for example, in U.S. Pat. Nos. 5,331,573, 5,579,250 and 5,612,895, which as all patents, applications and publications referenced herein, are each incorporated in their entirety. These methods involve: simulating a real-size primary structure of a polypeptide in a solvent box, i.e., an aqueous environment; shrinking the size of the peptide isobarically and isothermally; and expanding the peptide to its real size in selected time periods, while measuring the energy state and coordinates, i.e., the bonds, angles and torsions of the expanding molecule. As the peptide expands to its full size, it assumes a stable tertiary structure. In most cases, due to the manner in which the expansion occurs, this tertiary structure will be either the most probable structure (i.e., it will represent a global minimum for the structure) or one of the most probable structures. The energy equations used to perform the ab initio simulation are based on the potential energy of the simulated molecule as described using molecular mechanics.

[0128] Once a model is built, it can be refined using energy minimization, molecular dynamics calculations, or simulated annealing as described herein. The steric and energetic quality of the structural models is then evaluated by analyzing the structural attributes of the model, such as phi and psi angles (e.g., by calculating Ramachandran or Balasubramanian or Balaji plots), or the energetics of the model, such as by calculating energy per residue or strain energy. If the overall quality of the model is not satisfactory, further iterative energy refinement can be performed until the model is considered to be acceptable (i.e., eₐᵥ<1.5, see below).

[0129] A preferred method for generating and refining the structural variant models is illustrated in FIG. 1. First, at block 100 of FIG. 1, protein sequence information, derived genetic polymorphisms, is obtained from the methods described earlier. At block 102, the protein is assigned to a protein superfamily in order to identify related proteins to be used as templates to construct a 3-D model of the protein. If the superfamily is not known, sequence analysis or structural similarity searches can be performed to identify related proteins for use as templates in homology modeling studies, as described herein, as indicated at block 104.

[0130] Once the conserved regions of the model are assembled, ab initio loop prediction (Dudek et al. (1998) J. Comp. Chem. 19:548-573) indicated at 106A or ab initio secondary structure generation techniques of block 106B, techniques in which the alignments are adjusted using information on the secondary structure, functional residues, and disulfide bonds as described herein, can be used to complete the model (e.g. U.S. Pat. Nos. 5,331,573; 5,579,250; and 5,612,895). This model, complete with loops, is then subjected to refinement procedures (block 110) based on molecular mechanics, molecular dynamics, and simulated annealing methods. Energetic refinement of the structure can be accomplished by performing molecular mechanics calculations using, for example, an ECEPP type forcefield (Dudek et al. (1998) J. Comp. Chem. 19:548-573) or through molecular dynamics simulations using, for example, a modified AMBER type forcefield (Ramnarayan et al. (1990) J. Chem. Phys. 92:7057-7076. As known to those of skill in the art a modified AMBER (version 3.3) force field is a fully vectorized version of AMBER (3.0) with coordinate coupling, intra/inter decomposition, and the option to include the polarization energy as part of the total energy (see, e.g., Weiner et al. (1986) J. Comp. Chem. 7:230-252). If necessary, the 3-D structures can be dynamically refined, for example, by using a simulated annealing protocol (e.g., 100 ps equilibration, 500 ps dynamics, up to 1000° K, 1 fs data collection).

[0131] The refinement process step 110 is used to offset problems that may arise when homology models are not built carefully or when they are built using fully automated methods. Problems that may arise include chain breaks (e.g. consecutive C^{α} atoms are farther apart than the optimum distance of 3.7 to 3.9 Å); distorted geometry (e.g. bond lengths and bond angles are too far from their optimal values); cis-peptide bonds (e.g., incorrect isomerization of the peptide backbone in non-proline residues when it is not required); disallowed backbone and side-chain conformations (e.g., dihedral angles do not satisfy the Ramachandran plot (see, Balasubramanian (1974) Nature 266:856-857) criteria for a fully favorable protein structure conformation); and misfolded loops (e.g. non-homologous loops are generated in unnatural conformations). The refinement procedure 110 removes distortions of covalent geometry by using energetic methdods, converts disallowed backbone and side-chain conformations into allowed ones using simulated annealing methods, conserves protein core structure and secondary structural elements built by homology, and rebuilds unnatural loop constructions (Dudek et al. (1998) J. Comp. Chem. 19:548-573).

[0132] For quality control (block 112), the protein structural characteristics, for example, stereochemistry (e.g., phi/psi and side chain angles), energetics (e.g., strain energy), packing profile (e.g., packing factor per residue) and hydrophobic packing are evaluated and required to meet acceptable criteria before the structures are used in further studies or inputted into a structural polymorphism database. Quality control using strain energies entails computing normalized residue energies (NREs) based on the equation:

e_{I}=[E(i,X)−E_{AV}(X)]/E_{SD}(X), where

[0133] E(i,X) is the energy of interactions of amino acid X in position i with protein environment and solvent;

[0134] E_{AV}(X), E_{SD}(X) is the average residue energies and their standard deviations calculated for 20 amino acids in more than 100 high-quality crystal structures; and

[0135] NREs characterize how favorable the interactions of each residue are within the protein environment (Majorov and Abagyan, (1998) Folding & Design 3:259).

[0136] The average NRE characterizes the overall quality of a protein structure and is defined as:

eₐᵥ=(1/N) Σᵢe_{I}, where

[0137] eₐᵥ≦0.5 denotes high-resolution X-ray crystal structures;

[0138] eₐᵥ≦1.0 denotes good as NMR and theoretical models; and

[0139] eₐᵥ≧1.5 denotes structures that require further refinement.

[0140] After the quality of structure is determined at block 112, the model is checked at block 114 to determine if it is satisfactory. If the overall quality of the model is not satisfactory, a “No” outcome at block 116, then remedial action is undertaken to fix problems at block 118, including further iterative energy refinement (block 110), and repeated checking (block 114). The refinement and evaluation is repeated until the model is considered to be acceptable, a “Yes” outcome at block 120, whereupon structural and/or physical properties (e.g. energetics and phi/psi angles) are calculated at block 122A and clinical data (if available) is obtained at block 122B. The model is then inputted into a structural polymorphism database at block 124.

[0141] FIG. 2 shows an exemplary method for generating structural variant models derived from genetic polymorphisms and using them in structure-based drug design studies. At the block numbered 200, patient data is acquired for a gene that exhibits genetic polymorphisms. Protein sequence information is then derived, at block 202. A check is made for determination of the 3-D structure of the native protein. If the 3-D structure has been determined, a “Yes” outcome at block 206, then a multiple sequence analysis is performed at block 208 to determine the exact amino acid variations for the structure. If the 3-D structure has not been determined, a “No” outcome at block 210, then the structure is determined using physiochemical methods at block 212.

[0142] Next, at block 214, the 3-D structural models for all variants are generated. A refinement process is then completed at block 216 for the structural models. As noted above in connection with FIG. 1, the process involves subjecting each model, complete with loops, to refinement procedures based on molecular mechanics, molecular dynamics, and simulated annealing methods. As before, the energetic refinement of the structure can be accomplished by performing molecular mechanics calculations using an ECEPP type forcefield (Dudek et al. (1998) J. Comp. Chem. 19:548-573), or through molecular dynamics simulations using, for example, a modified AMBER type forcefield (Ramnarayan et al. (1990) J. Chem. Phys. 92:7057-7076), where a modified AMBER (version 3.3) force field is a fully vectorized version of AMBER (3.0) with coordinate coupling, intra/inter decomposition, and the option to include the polarization energy as part of the total energy (Weiner et al. (1986), J. Comp. Chem. 7:230-252). If necessary, the 3-D structures can be dynamically refined, for example, by using a simulated annealing protocol (e.g., 100 ps equilibration, 500 ps dynamics, up to 1000° K, 1 fs data collection).

[0143] At block 218, a quality evaluation is performed for all the models. As described in connection with the quality evaluation process in FIG. 1, the evaluation at block 218 involves evaluating the protein structural characteristics, for example, stereochemistry (e.g., phi/psi and side chain angles), energetics (e.g., strain energy), packing profile (e.g., packing factor per residue) and hydrophobic packing, which must meet acceptable criteria before the structures are used in further studies or inputted into a structural polymorphism database.

[0144] After the model quality is determined, at block 220 the models are checked to determine if they are satisfactory for further use. If a model is not satisfactory, a “No” outcome at block 222, then the problems are identified and solved with remedial action at block 224. The remedial action may include further iterative energy refinement at block 216 and repeated checks of model quality at block 218. Once the models are satisfactory, a “Yes” outcome at block 226, structure-based drug design methods are applied at block 228 to identify potential new drugs that bind to the structural variant models. The drug design methods are described further below.

[0145] FIG. 3 shows another exemplary and alternative method for generating structural variant models derived from genetic polymorphisms and using them in structure-based drug design studies. The process of FIG. 3 is similar to the process of FIG. 2 from the initial process at block 300 of acquiring patient data for a gene that exhibits genetic polymorphisms through the process of obtaining models that are satisfactory (a “Yes” outcome at block 326). Thus, block numbers in FIG. 3 from 300 through 326 that correspond to FIG. 2 blocks numbered from 200 thorough 226 refer to similar operations. Unlike FIG. 2, however, the process illustrated in FIG. 3 then involves docking operations.

[0146] At block 328, once the models are determined to be satisfactory, drug molecules are docked with the structural variant models. Next, at block 330, the free energy of binding is evaluated with the potential drugs under study for each structural variant model. At block 332, the total free energy of binding is decomposed, based on the interacting residue in the protein active site. Lastly, at block 334, the free energy of binding is correlated with patient data, if the data is available. Thus, the 3-D structural data is employed in drug design. Details of using such structural data in drug design are described further below.

[0147] C. Crystal Structures

[0148] The crystal structure of any protein can be determined empirically and the resulting coordinates used as the basis for determing structures of variants. Such structures are often known (see, e.g., Kohlstaedt et al. (1992) Science 256:1773-1790 for a crystal structure of HIV-1 RT bound to a ligand).

[0149] 3. Use of 3-D Structural Variant Models in Drug Design

[0150] The structural differences in protein structural variants that arise due to genetic polymorphisms can have profound effects on biological activity. Because of the structural differences among the variants, they may have different physical or reactive properties and therefore may exhibit different biological activities. These differences may include, for example, different responses to a given drug, so that a drug which works well in a patient with one particular genetic polymorphism may not work as well in another patient exhibiting a different polymorphism.

[0151] The 3-D molecular structures of drug targets derived from genetic polymorphisms can be used in structure-based drug design studies to greatly advance the development of new pharmaceuticals. Relational databases of these 3-D structures that are derived from samplings of genetic polymorphisms over a patient population or a cross-section of the population can be used to design potential drugs in order to optimize effectiveness for the particular population.

[0152] The structures and databases described herein can provide information that is useful, for example, in designing a drug that is effective in the greatest percentage of the population. It is desirable that a given drug is effective in the largest percentage of the population, since such a drug is likely to have the greatest clinical utility and thus the greatest commercial value. A drug with superior performance properties is sometimes referred to as a “best in class” drug and is highly prized by pharmaceutical companies since this heralds market leadership and the likelihood of commercial success. The databases and methods described herein can be used to determine 3-D protein structures for drug targets that are associated with particular genetic polymorphisms and to use the structures in drug design studies for design and optimization of candidate drugs that exhibit activity over the broadest patient population.

[0153] Genetic polymorphisms may result in target protein structural variants in which drug efficacy correlates with specific populations or subpopulations. In some cases, it might be desirable to target drug design or drug therapy toward a specific patient population, such as a particular race, gender, or age group, affected by a certain disease or condition or toward those having a specific genetic polymorphism. The information derived from comparing the 3-D structural variants arising from different genetic polymorphisms may be useful for understanding why drugs are active or inactive in different subpopulations, or for assisting in developing new drugs to maximize efficacy across specific populations.

[0154] a. Selection of Relevant Structural Variants

[0155] The structural variant models in the structural polymorphism database provided herein can be used to design new drugs or to select a drug therapy that would be appropriate for a patient exhibiting a particular genetic polymorphism. As it may not be possible for a drug to work equally well for all polymorphisms, and thus all patients, representative structural variants can be selected for use in drug design studies in order to maximize biological activity based on genetic polymorphisms.

[0156] In some cases, structural variants are analyzed to determine the common structural features that are conserved through the selected models. These conserved features are used as a basis for drug design. In some cases, the structural variant corresponding to the genetic polymorphism occurring most commonly in a population can be selected for use in identifying drugs that would be effective in the greatest percentage of the population. Optionally, structural variants corresponding to a relevant subpopulation, such as a particular gender, age, race, or other characteristic, can be selected for use in designing drugs that are active in that subpopulation. In other cases, individual structural variant models can be selected for use in designing drugs that are specifically active against one target in one individual arising from a particular genetic polymorphism. Additionally, model structures that represent variants derived from patients that receive a specific treatment regimen or exhibit a particular clinical response (e.g. drug resistance) to a given drug are used as bases for drug design.

[0157] The relevant structural variants may be identified using the structural analysis tools described herein, optionally in combination with database and statistical analysis tools that permit a complete analysis and comparison of the molecular structures and properties of the structural variants. The structural variants selected based on the criteria including, but not limited to, those listed above are used in drug design.

[0158] b. Drug Design

[0159] Once the protein target structural models have been selected, structure-based drug discovery methodologies, for example, computational screening or docking (e.g., DOCK (available from University of Ca, San Francisco; and AUTODOCK available from Scripps Research Institute, La Jolla and others referenced herein or known to those of skill in the art), can then be used to design biologically-active compounds based on the 3-D structures of the biomolecular receptors.

[0160] Using these methods, drug designers can identify and computationally rank various potential clinical drug candidates for maximum efficacy, thus cutting the time and expense associated with drug discovery. The preferred design of drug candidates or the modification of existing drugs is based on the intermolecular interactions between the drug candidate or modified drugs and the selected structural variants predicted by computationally docking drug molecules with the target protein models; energetically refining the docked complexes; determining the binding interactions between the drug or potential new drug candidate molecules and the models by calculating the free energy of binding of the docked complexes and decomposing the total free energy of binding based on interacting residues in the protein active site or sites deemed important for protein activity.

[0161] C. Computational Docking

[0162] Methods for using the structural variant models to design potential new drugs or to aid in the selection of a drug therapy based on the interactions of selected small molecules with the particular variants are provided. Structure-based drug design experiments, such as computational screening or docking studies, calculation of binding energies or analysis of steric, electrostatic or hydrophobic properties of the resulting structural variant models, can be performed on selected structural variant models to aid in the understanding of observed biological activities or to determine new potential drug candidates to bind to the particular target.

[0163] In a typical computational docking protocol, the active site, or sites deemed important for protein activity, of the protein model is defined. A molecular database, such as the Available Chemicals Directory (ACD) or any database of molecules, is screened for molecules that complement the protein model. Solvation parameters are factored in (see, e.g., Shoichet et al. (1999) PROTEINS: Structure, Function, and Genetics 34:4-16). In these computational docking studies, drugs or drug candidates are fitted to the structural variant models based on complementary interactions (e.g., steric, hydrophobic, or electrostatic interactions). Methods for performing such studies are well known and software tools for performing the calculations are widely available (M. Lambert, “Docking Conformationally Flexible Molecules into Protein Binding Sites” in Practical Application of Computer-Aided Drug Design, Charifson, Ed., Marcel Dekker, NY, pp. 243-303; Kuntz (1992) Science 257:1078-1082; Kuntz et al. (1982) J. Mol. Biol. 161:269-288; Stewart et al. (1992) Med. Chem. Res. 1:439-443; Shoichet et al. (1993) Science 259:1445-1450; Shoichet et al. (1991) J. Mol. Biol. 221:327-346).

[0164] New potential drug candidates can be designed by identifying potential small molecule drugs that can bind to a particular structural variant. This is accomplished, for example, by methods including, but are not limited to, methods for electronic screening of small molecule databases as described herein, methods involving modifying the functional groups of existing drugs in silico, methods of de novo ligand design. Methods for computationally desiging drugs are known to those of skill in the art and include, but are not limited to, DOCK (Kuntz et al. (1982) “A Geometric Approach to Macromolecule-Ligand Interactions”, J. Mol. Biol., 161:269-288; available from University of Ca, San Francisco); and AUTODOCK (see, Goodsell et al. (1990) “Automated Docking of Substrates to Proteins by Simulated Annealing”, Proteins: Structure, Function, and Genetics, 8, pp. 195-202; available from Scripps Research Institute, La Jolla); GRID (Oxford University, Oxford, UK); CAVEAT (UC Berkeley, Calif.), LEGEND (Molecular Simulations, Inc., San Diego, Calif.); LUDI (Molecular Simulations, Inc., San Diego, Calif.); HOOK (Molecular Simulations, Inc., San Diego, Calif.); CLIX (CSIRO, Australia); GROW (Upjohn Laboratories, Kalamazoo); others including HINT, LUDI, NEWLEAD, HOOK, PRO-LIGAND and CONCERTS (see, M. Murcko, “An Introduction to De Novo Ligand Design” in Practical Application of Computer-Aided Drug Design, Charifson, Ed., Marcel Dekker, NY, pp 305-354), methods based on QSAR (quantitative structure-activity relationships, QSAR and Drug Design: New Developments and Applications, Fugita, Ed., (1995) Elsevier, pp 3-81; 3D QSAR in Drug Design, Kubinyi, Ed., (1993) Escom, Leiden), and other methods known to those of skill in the art for determining molecules that have optimal binding interactions with a selected target.

[0165] The docked complexes, if needed, are further refined energetically to optimize geometries within the binding site and to select the best structure from a set of possible structures, using molecular mechanics, molecular dynamics, and simulated annealing techniques, including those described herein and others that are known to those skilled in the art.

[0166] d. Free Energy of Binding Studies

[0167] After the computational docking step, the free energy of binding of the docked complex is calculated, and the total free enegy of binding is decomposed based on the interacting residues in the protein active site or sites deemed improtant for protein activity. Analyses of the binding energies are needed to identify drug candidates. If needed or desired, the free energy of binding of different drugs or potential drugs to each structural variant model can be calculated by substracting the free energy of the non-interacting protein and drug from the free energy of the protein-drug complex. The total free energy of binding is decomposed into its various thermodynamic components, e.g. enthalpic and entropic components, based on the interacting residues in the protein active site in a solvated model to characterize the structural and thermodynamic features in the mode of drug binding and to determine the contribution of the solvent (see, e.g., Wang et al. (1996) J. Am. Chem. Soc. 118:995-1001; Wang et al. (1995) J. Mol. Biol. 253:473-492; Ortiz et al. (1995) J. Med. Chem. 38:2681-2691, which describes a computational method for deducing QSARs from ligand-macromolecule complexes). Following the computational drug design protocol described herein, any potential new drugs that are identified can be synthesized in, for example, industry or academia, and subjected to further biological testing, such as in vitro studies or pre-clinical and clinical in vivo testing.

[0168] Based on the predicted intermolecular interactions of the drugs or modified drugs with the structural variant models from binding studies, potential drug candidates that are specific for a protein with a selected polymorphism or that specifically interact with all proteins exhibiting the polymorphism can be identified.

[0169] It is also possible to individualize drug design or drug therapy by determining the structural variants associated with a particular patient and then designing or screening drugs or potential drugs to maximize efficacy in that subject or in a subpopulation that exhibits the same genetic polymorphism. The variants may also be used to track polymorphic variations in infectious organisms, such as viruses. For example, the human immunodeficiency viruses (HIVs) reverse transcriptase and protease have served as drug targets (see, Erickson et al. (1996) Ann. Rev. Pharmacol. Toxicol 36:545-571); their three-dimensional structures are known (see, e.g., Nanni et al. (1993) Perspectives in Drug Discovery and Design 1:129-150; Kroeger et al. (1997) Protein Eng. 10:1379-1383). The clinical emergence of drug-resistant variants of these viruses has limited the long-term effectiveness of drugs targeted against these enzymes.

[0170] As noted, these enzymatic proteins in order to preserve function must exhibit conserved 3-D structures. The methods herein permit design of drugs specific for the conserved regions of the 3-D structures. They also permit selection of drug regimens based upon the alleles expressed. Hence, methods for designing HIV enzyme-specific drugs are provided. Flow charts illustrating exemplary alternative embodiments using protein 3-D structures derived from genetic polymorphisms in structure-based drug design studies are provided (see, FIGS. 2 and 3). In the flow charts depicted in these figures, the drug design includes structure-based drug design methods (see, FIG. 2) and computational docking of drugs with structural variants, evaluation of the binding energy of the docked complexes, and correlation of the binding energy with patient data such as age, gender, race, drug treatment history, and any other pertinent information that is available (see, FIG. 3). The data generated by this computer-based method can be stored in a database, such as, for example, in a relational database. The resulting database can be screened using searching tools to select potential drugs and therapeutic agents that bind to or exhibit biological responses towards target proteins.

[0171] C. Applications of Computer-Based Methods

[0172] As discussed above, the computer-based methods provided herein include some or all of the steps of obtaining one or more, preferably two or more, amino acid sequences of a target protein that is the product of a gene exhibiting genetic polymorphisms; generating 3-dimensional (3-D) protein structural variant models from the sequences; and based upon the structures of the 3-D models, designing drug candidates or modifying existing drugs based on the predicted intermolecular interactions of the drug candidates or modified drugs with the structural variants by computationally docking drug molecules with the target protein models; energetically refining the docked complexes; determining the binding interactions between the drug or potential new drug candidate molecules and the models by calculating the free energy of binding of the docked complexes and decomposing the total free energy of binding based on interacting residues in the protein active site or sites deemed important for protein activity. There are numerous applications of these methods, which include structure-based drug design and drug testing; selection of clinically relevant populations for drug testing and other such methods.

[0173] 1. Genetic Polymorphisms and Structure-Based Drug Design

[0174] As noted above, structure-based drug design is an increasingly useful methodology that has made a great impact in the design of biologically active lead compounds. Drug designers can design and screen potential new drugs via computational methods, such as docking or binding studies, before actually beginning patient testing. The drugs designed by such methods, and also those identified by traditional methods of drug discovery, are then tested in clinical trials. Among those that show efficacy for a particular indication and low toxicity ultimately are approved for use. It is found, however, that not all patients with a particular indication respond uniformly to the drugs. The drug may not be efficacious or side-effects may be pronounced.

[0175] The methods provided herein, represent a further advance in the use of rational drug design methods. As described herein, polymorphic variation has an effect upon the 3-D structure of encoded proteins. As a result, drugs interact with variants differently, leading to differential responses in the population as a whole. A new approach to drug design and testing is provided herein. This methods involves identifying polymorphisms and determining 3-D resulting structures, which are then used in methods, including, computational drug design, in the selection of patient populations, in designing treatment protocols and in other applications.

[0176] 2. Drug Resistance

[0177] Methods for understanding and overcoming drug resistances by using 3-D protein model structures resulting from multiple genetic polymorphisms or mutations in an infectious agents, such as viruses, bacterial and other pathogenic agents are provided. Also provided are methods for using this information in drug design studies.

[0178] In the case of infectious organisms or other replicating or mutating agents, such as flu, HIV, rhinovirus or biological warfare agents, some polymorphisms or mutations may arise over time which convey resistance or susceptibility to specific drug therapy, for example, by altering the drug target structure or physical properties so that a specific drug or therapy, such as an antibiotic or vaccine, may no longer be able to bind to or otherwise interact with the target protein to exert its desired biological effect. For certain infectious agents, such as HIV, genetic polymorphisms in certain genes give rise to drug resistance as the virus mutates (see, e.g., Erickson et al. (1996) Annu Rev. Pharmacol. Toxicol. 36:545-571).

[0179] Where drug resistance that arises from mutations or poly-morphisms is observed, the methods described herein can be used to develop new drugs that overcome the resistance. For example, once drug resistance is observed, the structure associated with the resistant polymorphism can be determined and used in further drug design studies to suggest new drugs or modifications to the existing drug that will restore biological activity by targeting different mutants or that will target multiple mutants simultaneously.

[0180] The model structures can also be used to correlate drug resistance in infectious diseases with the structural variants derived from genetic polymorphisms. Here, the 3-D structure of the virus or other drug target is determined for the particular variant model against which the drug was effective. When drug resistance arises due to a genetic polymorphism, a model for the structure variant associated with the resistant organism can be generated, and a new drug can be designed or modifications can be made to the existing drug to overcome the resistance.

[0181] For example, samples of the mutating organism can be obtained over time and structural models for the resulting proteins can be generated. These models can then be used to design new drug therapies that are active against the mutated organism. Multiple drug resistant structures can be analyzed to obtain an average structure or to identify common structural features in order to design new drugs that have the broadest spectrum of activity against multiple mutations.

[0182] Such structural information is useful in designing effective drug therapies to overcome resistance or to develop drugs that are effective over a range of genetic polymorphisms and thus work for the maximum number of patients.

[0183] 3. Identification of Conserved Structural Features or Pharmacophores

[0184] If common structural features are observed over a range of protein targets that are derived from genetic polymorphisms, these common features may be used to design a drug that is effective with a variety of genetic polymorphisms and thus many patients. The retention of certain common structural features over a large number of genetic polymorphisms suggests that those features may not be mutatable because the conserved structure may be essential to protein function, e.g., to the viability of an infectious organism or virus. Such conserved structural elements are prime targets for structure-based drug design, e.g., anti-infective or antibiotic drug design, and can lead to highly effective therapies.

[0185] The common structural features can serve as a basis for structure-based drug design, for example, by serving as a scaffold for building a receptor model into which potential drug candidates can be docked or as a pharmacophore query for screening a library of physical or virtual chemical or biochemical molecules to identify compounds that match the pharmacophore template and, thus, are potential drug candidates.

[0186] Analysis of 3-D protein structural variants derived from genetic polymorphisms to identify the common structural features over a large number of structural variants can aid in the design of drugs that are active over a broad range of genetic polymorphisms, such as in a large number of patients or against drug resistant targets.

[0187] In comparing sets of related protein structures, such as those with the same biological function or those resulting from genetic polymorphisms, certain parts of the structural framework are often found to be conserved, while other parts vary among the proteins. Mutations that occur in the conserved regions of the structure can have significant effects biological activity. For example, in viruses, the conserved features can be essential to protein function and, thus, to the viability of the infectious organism or virus. Identifying the conserved structural features over a range of structures often gives insight into which structural features are necessary for biological activity and are therefore non-mutatable. By analyzing a number of structural variants derived from genetic polymorphisms that exhibit drug resistance, it is possible to identify or design drugs that interact best with the common structural features in all of the variants. Using these features in structure-based drug design studies leads to the identification of drugs that retain biological activity despite multiple mutations, or polymorphisms, and could help to overcome the problem of drug resistance.

[0188] In certain preferred embodiments, new potential drug candidates can be identified using the structural variant models by identifying pharmacophores or conserved features in the protein structural variant models and using this structural information to identify small molecules that would bind to the structural variant models.

[0189] Using structural comparison tools described herein, the common structural features that are conserved across a range of structural variant models of a given protein based on different genetic polymorphisms can be identified. To do this, multiple structural variant models are compared, generally by superimposing the coordinates of one variant model onto those of one or more other variants and observing the structural fit. Such functionality is commonly found in molecular graphics or homology modeling packages. Once the optimum fit of structures is performed, then the structural features that are present throughout the structural variant models can be identified and used as the basis for drug interactions in structure-based drug design studies. For example, the pharmacophores or conserved features can be specified as database queries and a library or database of small molecule structures can be searched to identify new lead compounds to bind to the pharmacophores. Alternatively, other structure-based ligand design strategies can be employed to design lead compounds or to identify modifications to be made to existing drugs to improve biological activity.

[0190] 4. Identification of Compensatory Structural Changes

[0191] Certain proteins, for example, viral proteins or other infectious organisms, may harbor multiple genetic polymorphisms. Since each genetic polymorphism can give rise to slight changes in structure, some, and over time, many, additional genetic polymorphisms may cause changes in the protein structures that significantly affect biological activity. These structural changes could result in, for example, different dynamical behavior, alteration in enzyme kinetics or differences in substrate recognition, which can significantly alter drug response. For example, a mutation for one drug compound can suppress a mutation to a second drug due to compensatory effects. In these cases, a drug which is predicted to be ineffective for a given patient based upon the single nucleotide correlation may, in fact, be effective as a result of these changes.

[0192] Because mutations are so frequent in AIDS and other viruses, few sequences are exactly the same in different patients. Thus, it is difficult or inconclusive to generate multiple mutation sequence correlations for drug resistance. If each patient has a different viral sequence due to a high viral mutation rate, then no sequence correlation is even possible in such cases.

[0193] The methods described herein can be used to study the effects of multiple genetic polymorphisms on a resultant protein structure. Multiple mutations are common in AIDS and other viruses, which makes sequence correlation difficult. By observing the structural effects of the mutations on the resulting protein, it is possible to look at the net effect of all structural changes and to consider the overall structure of the protein in drug design studies. For example, a mutation might occur in the active site, or site of drug action, in a protein. Additionally, there may be related mutations in other parts of the protein structure, which might not be identified from a single point mutation correlation. These related mutations could have an effect on biological activity of the protein. By looking only at the active site, it might be predicted that a drug or potential drug would not bind to the protein. The additional mutation, however, might cause compensatory structural changes in the protein structure that alter its properties in a way that restores biological activity.

[0194] By computing 3-D protein structures from gene sequences containing multiple polymorphisms, it is possible to more accurately predict the effect of multiple sequence mutations on protein structure and, thus, to obtain a better correlation between sequence and drug resistance than by considering sequence correlations alone. This information can be useful, for example, in understanding drug resistance and can aid researchers and clinicians in developing new drug therapies to overcome drug resistance.

[0195] The structures that are derived based on multiple generic polymorphisms can be used in structure-based drug design studies to provide frameworks, or scaffolds, into which drug or potential drug molecules can be docked. This permits the design of drugs that are active against a wider range of structural variants, thus, in more patients or against a range of drug resistant proteins.

[0196] 5. Clinical Applications

[0197] A knowledge of the repertoire of structural differences arising from genetic polymorphisms across the human population or specific subpopulations can provide insight into the differing biological responses in patients based on their genetic differences. For example, where clinical data are available for patients having particular genetic polymorphisms, this information can be associated with the 3-D protein structural variants and used to find correlations between polymorphisms and observed drug responses.

[0198] The methods provided herein can be used to design drug therapies that bring about favorable clinical responses (or eliminate unfavorable effects) in patients, to identify pharmacological effects of drugs in different patient subpopulations (e.g. age, race, gender) and to simulate clinical trails to increase the probability that the trials will yield optimal results.

[0199] Because of the high cost of clinical trials, such studies are generally focused on small patient populations. The structural analysis tools described herein permit the extension of clinical trials to cover patient populations not specifically included in the study. This is accomplished through correlation of the structural variants derived from genetic polymorphisms with clinical responses.

[0200] The molecular structures and databases described herein can also find application in the understanding and prediction of clinical or pharmacological drug responses, for example, efficacy, toxicity, dose dependencies or side effects in patients. For example, relational databases containing 3-D protein structural variants can provide a means for managing and using the information to understand and predict clinical responses in patients.

[0201] In other embodiments, observed clinical data from patients in a clinical trial can be associated with the structural variant models for each genetic polymorphism exhibited in the clinical subjects, for example, in a structural polymorphism relational database. The correlation between the structural variants and observed clinical effects can then be utilized to predict clinical outcomes in patients that did not participate in the clinical trial. For example, a structural variant model can be generated for a patient based on a genetic polymorphism exhibited in the patient, and the database can be mined to identify structurally similar variants for which clinical results are known. Structural similarity can be determined, for example, by superimposing the structures and measuring the RMS (root mean squared) differences between the structures or by using pattern matching or motif searching algorithms. The results can be used to predict clinical responses in the patient based on the clinical data associated with the structurally similar variants.

[0202] The predicted correlations can also be used to aid in the design of subsequent clinical trials. The follow-up trials can be made more effective through the judicious selection of patients with given genotypes (i.e., those exhibiting the same genetic polymorphisms), as guided by the structurally predicted outcomes. For example, a clinical trial can be designed based on a subpopulation of clinical subjects which exhibit a specific genetic polymorphism (i.e. structural variant) to demonstrate the effectiveness of a given therapeutic on a targeted population.

[0203] In other embodiments, the methods provided herein can be used in the selection of drug therapies for patients exhibiting a particular genetic polymorphism. This is accomplished by generating the structural variant model associated with the polymorphism, docking drug molecules that might be used to treat the patient into the structural variant model and calculating the binding energies of each drug with the variant. The results of docking or free energy calculations can be correlated to clinical data, for example, patient population (e.g., ethnic background, race, sex, age), treatment regimen, patient response to a particular drug or duration of treatment. The binding energies can be compared, for example, to determine which drug would best bind to the variant in order to identify the drug that could best be used to treat the patient to optimize biological activity.

### D. CREATION OF 3-D STRUCTURAL POLYMORPHISM DATABASES

[0204] The above-noted methods all rely upon the use of databases of nucleic acid sequences. Any such database known to those of skill in the art may be employed; numerous such databases are publically available (e.g. the Stanford HIV database). The Stanford HIV database is hierarchal database with information about HIV patients who received or did not receive protease inhibitor treatments, patient-dates, isolates, sequences, hyperlinks to MEDLINE and GenBank abstracts, and art. This database, however, does not contain 3-D protein structures of any proteins including HIV reverse transcriptase (RT) and HIV protease (PR; see, e.g., Shafer et al. (1999) Nucleic Acids Res. 27:348-352, Shafer et al. (1999) J. Virol 73:6197-6202, http://hivdb.stanford.edu/hiv, Richter (Jan. 20, 1999) “AIDS drugs found to be effective in the world's most common HIV strains).

[0205] Databases of sequences and associated information may also be generated as described herein by obtaining samples and sequences from a variety of sources. In all instances, further databases are generated by then calculating 3-D structural models of the encoded proteins or relevant portions, such as active binding sites, thereof, from the nucleic acid sequence information. It is these databases of nucleic acid sequence and/or primary protein sequence and the associated 3-D structure that are provided herein and that are used in the all of the methods, except for the computational phenotyping discussed below, which does not require a database, provided herein. Hence databases containing computationally determined 3-D structures of polymorphic proteins or portions thereof are provided herein. These databases serve as tools in a variety of methods, including those provided herein.

[0206] Databases that include 3-D structures for variant proteins encoded by the nucleic acids that contain polymorphisms are provided. These are generated after 3-D structural models are constructed for the protein structural variants, preferably for all of the protein structural variants, representing the genetic polymorphisms, by inputting the atomic coordinates into a structural polymorphism database, preferably a relational database, and optionally with associated structural and/or physical properties (e.g., phi/psi and side-chain angles and energetics), and other data, if available, including, but are not limited to, historical data, such as parental medical histories, and clinical data. The resulting database is used in structure-based drug design studies and for clinical analyses. FIG. 11 is a tabulation of the 3-D coordinates of a representative entry, an HIV protease, that is encoded by the DNA in one of SEQ ID Nos. 3-74 and 77-117, and that is an entry in an exemplary database that includes 3-D structures. Exemplary databases that contain the nucleic acids sequences and structures of all proteins encoded by SEQ ID Nos. 3-117 as well additional nucleic acids are provided herein and are described in the EXAMPLES.

[0207] A database is preferably interfaced to a molecular graphics package that includes 3-D visualization and structural analysis tools, to analyze similarities and variations in the protein structural variant models (see, copending U.S. application Ser. No. 09/531,995, which is published as International PCT application No. WO 00/57309, and is a continuation-in-part of U.S. application Ser. No. 09/272,814, filed Mar. 19, 1999). Briefly, International PCT application No. WO 00/57309 provides a database and interface for access to 3-D molecular structures and associated properties, which can be used to facilitate the design of potential new therapeutics. The interface also provides access to other structure-based drug discovery tools and to other databases, such as databases of chemical structures, including fine chemical or combinatorial libraries, for use in structure-focused high-throughput screening, as well as to a host of public domain databases and bioinformatics sites. The interface also provides access to other structure-based drug discovery tools and to other databases, such as databases of chemical structures, including fine chemical or combinatorial libraries, for use in structure-focused high-throughput screening, as well as to a host of public domain databases and bioinformatics sites. This interface can be modified as needed to adapt for use with a paritcular database.

[0208] A relational database that collects multiple data files relating to the same molecular structure in the same subdirectory and that provides an interface to access all of the collected files from the same structure using the same user interface program is also provided. The collected files include a variety of information and computer file formats, depending on the type of information to be conveyed to users of the database. In practice, a user communicates over a public network, such as the Internet, or over a controlled network, such as an internet, with a secure file server that controls access to the collected files, and the interface to the collected files is provided by a standard graphical user interface program that is widely available. In this way, a convenient means of searching molecular structure data for characteristics of interest is provided. Data searching, file viewing, and investigation of multiple representations of molecular structures from within a single viewing program can also be performed using the database and interface.

[0209] The data files can be those available over a wide network such as the Internet, and a suitable graphical user interface designed or obtained. Such interface is used for viewing the data files is a standard Internet web browser program, such as the web browser products by Netscape Communications, Inc. and Microsoft Corporation that are distributed free of charge. Such browser products readily import and provide views of files having a wide variety of formats that contain alphanumeric, video, and audio data. A security server is preferably located between the user browser program at a network client machine controls access to the database, which is housed at a file server connected to the security server. Before a user gains access to the database, the security server checks authorization for the individual user and then, if appropriate, permits downloading of appropriate data from the database file server. It is contemplated that the databases containing 3-D structures of proteins or portions thereof the exhibit polymorphism will be loaded.

[0210] Data for a molecular structure is loaded into the database by specifying the file pathnames for the various data files that contain the different types of data, including the different molecule views. Using a browser to view the data files permits various helper applications, called plug-ins, to smoothly and transparently accept the different file formats and provide views to the user. The various data files of the database are organized in accordance with the database design when they are loaded into the database and are managed by a relational database management program.

[0211] In addition to 3-D protein structures and associate primary sequences, as provided herein, the database can optionally contain associated biological or clinical data, such as drug resistance, side effects, efficacy, pharmacokinetics and other data, that correlate with or can be correlated the structural variants. This information will be used for correlating observed clinical effects to specific structural variants and for predicting clinical responses and outcomes based on a patient's structural variants, i.e., genetic polymorphisms.

[0212] Structural analysis tools are preferably integrated with the structural database for comparing and analyzing the resulting protein structural variant models. For example, the molecular graphics software package described in International PCT application No. WO 00/57309, includes structural analysis capability to measure the structural attributes of the model (distances, angles, etc.), to analyze sequences and secondary structures, to study physical properties such as hydrophobicity, electrostatic potential, and active or reactive sites in the protein, as well as to evaluate the quality of the structure (both conformationally and energetically).

[0213] Structures can also be compared by aligning them, such as by performing a least squares fitting of the x-, y- and z-coordinates of each of the structural variant models and superimposing the structures or any other alignment method or structural comparison method. For example, the structures of the variants can be clustered, or grouped together, based on structural similarity. This can save time over studying each structural variant independently because, where structures are considered to be similar enough that they are clustered together (e.g., if their structures can be superimposed within a specified tolerance), then only a representative structure, or perhaps an average structure or scaffold, which is derived as a composite of the individual structural variant models, can be used in further drug design studies.

[0214] Tools for database searching can also be included in the software package. These can be used to query the database for structural variant models having similar properties, such as molecular structure or sequence similarity. These tools are used, for example, to mine the database to identify variant models that are structurally similar (e.g. to find structures that overlap within a specified tolerance), and thus would be predicted to interact in the same way with potential drugs or exhibit the same clinical response. This information could be useful in understanding the structural or clinical effects of different genetic polymorphisms and could potentially save time and money by extending the results of previously performed clinical or computer-based drug design studies to predict the results of studies on similar structural variants that have not yet been performed.

[0215] 1. Exemplary Databases

[0216] Databases containing data representative of the 3-D structure of structural variants encoded by a selected gene or genes or the 3-D structure of other polymorphic variants are provided. The selected genes can be genes of drug targets, such as receptors, and genes of infectious agents, such as the HIV protease or reverse transcriptase. Exemplary databases are presented in Example 5 which describes the construction, interface, use and applications of HIV PR and RT databases. These databases may be stored on any suitable medium and used in any suitable computer system. Systems and methods for generating, storing and processing databases are well known.

[0217] 2. Computer Systems

[0218] Computer systems for processing the databases and computer systems containing the databases are provided. The processing that maintains the database and performs the methods and procedures using the databases may be performed on multiple computers, or may be performed by a single, integrated computer. For example, the computer through which data is added to the database may be separate from the computer through which the database is sorted or analyzed, or may be integrated with it. Each computer operates under control of a central processor unit (CPU), such as a “Pentium” microprocessor and associated integrated circuit chips, available from Intel Corporation of Santa Clara, Calif., USA. A computer user can input commands and data from a keyboard and display mouse and can view inputs and computer output at a display. The display is typically a video monitor or flat panel display device. The computer also includes a direct access storage device (DASD), such as a fixed hard disk drive. The memory typically includes volatile semiconductor random access memory (RAM). Each computer preferably includes a program product reader that accepts a program product storage device from which the program product reader can read data (and to which it can optionally write data). The program product reader can include, for example, a disk drive, and the program product storage device can comprise removable storage media such as a magnetic floppy disk, an optical CD-ROM disc, a CD-R disc, a CD-RW disc, or a DVD data disc. If desired, computers can be connected so they can communicate with each other, and with other connected computers, over a network. Each computer can communicate with the other connected computers over the network through a network interface (see, e.g., Examples below) that permits communication over a connection between the network and the computer.

[0219] The computer operates under control of programming steps that are temporarily stored in the memory in accordance with conventional computer construction. When the programming steps are executed by the CPU, the pertinent system components perform their respective functions. Thus, the programming steps implement the functionality of the system as described above. The programming steps can be received from the DASD, through the program product reader, or through the network connection. The storage drive can receive a program product, read programming steps recorded thereon, and transfer the programming steps into the memory for execution by the CPU. As noted above, the program product storage device can include any one of multiple removable media having recorded computer-readable instructions, including magnetic floppy disks and CD-ROM storage discs. Other suitable program product storage devices can include magnetic tape and semiconductor memory chips. In this way, the processing steps necessary for operation can be embodied on a program product.

[0220] Alternatively, the program steps can be received into the operating memory over the network. In the network method, the computer receives data including program steps into the memory through the network interface after network communication has been established over the network connection by well known methods that will be understood by those skilled in the art without further explanation.

[0221] The computer that implements the client side processing, and the computer that implements the server side processing, or any other computer device of the system, may comprise any conventional computer suitable for implementing the functionality described herein. FIG. 9 is a block diagram of an exemplary computer device 900 such as might comprise any of the computing devices in the system. Each computer operates under control of a central processor unit (CPU) 902, such as an application specific integrated circuit (ASIC) from a number of vendors, or a “Pentium”-class microprocessor and associated integrated circuit chips, available from Intel Corporation of Santa Clara, Calif., USA. Commands and data can be input from a user control panel, remote control device, or a keyboard and mouse combination 904 and inputs and output can be viewed at a display 906. The display is typically a video monitor or flat panel display device.

[0222] The computer device 900 may comprise a personal computer or, in the case of a client machine, the computer device may comprise a Web appliance or other suitable Web-enabled device for viewing Web pages. In the case of a personal computer, the device 900 preferably includes a direct access storage device (DASD) 908, such as a fixed hard disk drive (HDD). The memory 910 typically comprises volatile semiconductor random access memory (RAM). If the computer device 900 is a personal computer, it preferably includes a program product reader 912 that accepts a program product storage device 914, from which the program product reader can read data (and to which it can optionally write data). The program product reader can comprise, for example, a disk drive, and the program product storage device can comprise removable storage media such as a floppy disk, an optical CD-ROM disc, a CD-R disc, a CD-RW disc, a DVD disk, or the like. Semiconductor memory devices for data storage and corresponding readers may also be used. The computer device 900 can communicate with the other connected computers over a network 916 (such as the Internet) through a network interface 918 that enables communication over a connection 920 between the network and the computer device.

[0223] The CPU 902 operates under control of programming steps that are temporarily stored in the memory 910 of the computer 900. When the programming steps are executed, the pertinent system component performs its functions. Thus, the programming steps implement the functionality of the system illustrated in FIG. 1. The programming steps can be received from the DASD 908, through the program product 914, or through the network connection 920, or can be incorporated into an ASIC as part of the production process for the computer device. If the computer device includes a storage drive 912, then it can receive a program product, read programming steps recorded thereon, and transfer the programming steps into the memory 910 for execution by the CPU 902. As noted above, the program product storage device can comprise any one of multiple removable media having recorded computer-readable instructions, including magnetic floppy disks, CD-ROM, and DVD storage discs. Other suitable program product storage devices can include magnetic tape and semiconductor memory chips. In this way, the processing steps necessary for operation in accord with the methods herein can be embodied on a program product.

[0224] Alternatively, the program steps can be received into the operating memory 910 over the network 916. In the network method, the computer receives data including program steps into the memory 910 through the network interface 918 after network communication has been established over the network connection 920 by well-known methods that will be understood by those skilled in the art without further explanation. The program steps are then executed by the CPU 902 to implement the processing of the system.

[0225] To implement the functionality described herein, it has been found that a suitable computer for performing database server tasks includes a “Pentium” level CPU having at least 128 MB of memory, 30 GB of disk storage, and 256 MB of disk swap space for files. A recommended configuration for computer performance would include, for example, a “Pentium III” processor at 700 MHz or faster, memory of 256 MB or greater, disk storage space of 50 GB or more, and swap space of 500 MB or more. A suitable configuration for performing user tasks as described above includes a “Pentium” level CPU having 128 MB memory, disk space of 240 MB with swap space of 256 MB, and an optional display circuit card supporting OpenGL and having 4 MB of memory. A recommended configuration includes, for example, a “Pentium III” processor at 500 MHz or faster, memory of 256 MB or greater, disk space of 500 MB or more, swap space of 500 MB or more, and an optional display card having 8 MB of memory or more, supporting resolution of 1024×768.

[0226] In a preferred embodiment, the software used in the computing system described above includes, for the server machine, operating system software such as “Windows NT Server 4.0” from Microsoft Corporation, with Service Pack 5, Version 1280 (10 Jun. 1999) or more recent, with database management server software such as, but are not limited to, “Oracle Server Standard Edition 8.1” from Oracle Corporation. The software used in a preferred embodiment of the user machine includes operating system software such as “Windows NT Workstation 4.0” from Microsoft Corporation, with Service Pack 5, version 1280 (10 Jun. 1999) or more recent, as well as “Oracle Client Standard Edition Version 8.1” or higher. The client machine will also be compliant with the “Java” programming language (Java Runtime Environment 1.2.2). As will be known to those skilled in the art, other configurations may be suitable, depending on the applications being used and the computer performance desired.

### E. COMPUTATIONAL PHENOTYPING

[0227] Also provided herein is a method designated computational phenotyping. Computational (also referred to herein as in silico phenotyping). This refers to the method in which a 3-D protein structure is generated from a given genotype and protein-drug binding analyses in silico (computationally) are performed in order to determine whether drug binding does (i.e. sensitive) or does not (i.e. resistant) take place. This type of analysis is contemplated to be performed for an individual patient or subject or groups thereof, such as ethnic groups, gender-based or age-based groups, particular species or groups thereof) to assess or select a drug for treatment of a particular disease or other such use, and is done to assess efficacy of a particular drug on a desired target, where the target exhibits polymorphisms. The following discussion and example, below, is with reference to HIV PR and RT, but it is understood that the methods and applications can be applied to any protein or gene product that exhibits polymorphic variation, and particularly to gene products that are drug targets.

[0228] Among the methods of computational phenotyping, there are three distinct methodologies that are clinically useful for determining either resistance or sensitivity to particular HIV-1 antiviral therapeutics. These are: genotyping, phenotyping, and virtual phenotyping. These methodologies are used to optimize the choice of therapeutics during the initiation of therapy, after drug failure, and/or during salvage therapy. Genotyping involves extracting the HIV viral RNA and amplifying all or part of the genes encoding the protease and reverse transcriptase proteins and sequencing them in order to assess the presence of resistance-associated mutations.

[0229] In phenotyping, the amplified sequences are instead sub-cloned into expression vectors and then tested for their replicative ability in vitro by transfecting them into cultured and/or established cell lines, such as, for example, human T cells, monocytes, macrophage, dendritic cells, Langerhans cells, hematopoeitic stem cells, HeLa, XC, Mm5MT, LTL, COS 7, NIH3T3, LTA, MCF-7, or other cells derived from human tissues and cells that which are the principal targets of viral infection in the presence or absence of antiviral drugs (see, e.g., U.S. Pat. No. 5,837,464; see, also EP 0852626; EP 1012334; and EP 0877937), Virtual phenotyping (ViroLogic, Inc.) is an interpretive service in which the phenotype of a specimen (i.e. of a plant, animal, pathogen, or human) is inferred from the specimen's genotype based upon an extensive correlative database of known genotypes and phenotypes. Such a correlative database must be updated constantly to maintain clinical accuracy.

[0230] Similar to virtual phenotyping, computational or in silico phenotyping infers phenotype based upon specimen genotype. Computational phenotyping is distinct from virtual phenotyping in that sensitivity or resistance to drugs is determined directly through protein-drug binding analysis performed in silico and not through correlation with a database of known genotypes and phenotypes. The advantage of computational phenotyping is that new resistance conferring mutations can be discovered rapidly and in “real time” without the need for phenotyping to train the genotype. Moreover, in silico phenotypes are not subject to error caused from compensatory mutations which may act synergistically or anti-synergistically with resistance-associated mutations to increase, decrease, or reverse specific drug resistances. Computational phenotyping will generate information that can, for example, be presented in a report that is marketed within the in vitro diagnostics industry as an adjunct test/service to help optimize therapy and assist physicians, farmers, academic institutions, government agencies, and industries with specimen treatment. Thus, a computer-based method for predicting clinical responses e.g. drug sensitivity or drug resistance in patients, plants, animals, pathogens, and microorganisms based on genetic polymorphisms is provided.

[0231] The genotypes used in the methods are obtained from any source, including, but are not limited to, from a plant, animal, pathogen, or mammal with the most preferred source being a mammal, particularly a human for whom a particular drug treatment is contemplated, and is the genotype of the drug target, such as, as exemplified herein, HIV RT or PR from a particular infected individual. Other exemplary drug targets are proteins, polypeptides, oligopeptides, including, but not limited to, a receptor, enzyme, hormone, and any such compound with which drugs or other ligands interact to bring about a biological response. For exemplification of this method, the protein considered is an enzyme, in particular HIV protease (PR) and reverse transcriptase (RT), which are therapeutic drug targets. Nucleic acid encoding the target from individual sample, such as blood sample or other body fluid sample from a mammal, such as a human patient, is sequenced, and the 3-D structure thereof determined. The drug of interest is computationally tested to assess whether it interacts with the sample.

[0232] The following examples are included for illustrative purposes only and are not intended to limit the scope of the invention.

### EXAMPLE 1

### Binding Correlations of Mutant Forms of Hepatitis C Virus (HCV) Protease with Different Inhibitors

[0233] This example provides the results of a theoretical study of NS3 protease complexes with two known peptide inhibitors (see SEQ ID Nos. 1 and 2; Ingallinella et al. ((1998) Biochemistry 37:8906-8914).

[0234] Introduction

[0235] During HCV replication, the final steps of processing are performed by a virally encoded chymotrypsin-like serine protease NS3. NS3 is an approximately 3000 amino acid protein that contains, from the amino terminus to the carboxy terminus, a nucleocapsid protein (C), envelope proteins (E1 and E2) and several non-structural proteins (NS1, 2, 3, 4a, 4b, 5a and 5b). NS3 is an approximately 68 kDa protein, encoded by approximately 1893 nucleotides of the HCV genome, and has two distinct domains: (a) a serine protease domain containing approximately 200 of the N-terminal amino acids; and (b) an RNA-dependent ATPase domain at the C-terminus of the protein. The NS3 protease is considered a member of the chymotrypsin family and is a serine protease that is responsible for proteolysis of the polypeptide (polyprotein) at the NS3/NS4a, NS4a/NS4b, NS4b/NS5a and NS5a/NS5b junctions responsible for generating four viral proteins during viral replication. This protease is inhibited by N-terminal cleavage products of substrate peptides. The NS3 protease, which is necessary for polypeptide processing and viral replication has been identified, cloned and expressed (see, e.g., U.S. Pat. No. 5,712,145).

[0236] Active NS3 forms a heterodimer with a polypeptide cofactor NS4A. The crystal structure of NS3 with and without the NS4A cofactor is known (see, e.g., Love et al. (1996) Cell 87:331-342; Habuka et al. (1997) Jikken Igaku 15:2308-2313; Yan et al. (1998) Protein Sci. 7:837-847, which provides the structure with NS4A).

[0237] The NS3 protease is a target for design of antiviral drugs. For example, a series of potent hexapeptide inhibitors of NS3 has been developed by optimization of the product inhibitors (Ingallinella et al. (1998) Biochemistry 37:8906-8914).

[0238] Analyses

[0239] Models of the complexes of NS3 with the two protease inhibitor peptides were obtained by flexible docking of the peptides into the active site of the crystal structure of NS3/4A, followed by evaluation of protein-peptide binding energies. The models were tested by in situ modification of the docked ligands. A qualitative agreement between the binding energies and inhibitor IC₅₀ values obtained from literature was found.

[0240] The peptides studied were:

| | | |
|---|---|---|
| | | SEQ |
| Sequence* | IC⁵⁰, nM | ID |

| | | |
|---|---|---|
| Ac-Asp¹-D-Glu²-Leu³-Ile⁴-Cha⁵-Cys⁶-COO- | 15 | 1 |
| Ac-Asp¹-L-Glu²-Leu³-Ile⁴-Cha⁵-Cys⁶-COO- | 60 | 2 |

[0241] Cha=β-cyclohexylalanine

[0242] In the modeling studies, it was assumed that:

[0243] the high-affinity inhibitory peptides 1 and 2 have a similar mode of binding to the active site of NS3;

[0244] the minimum binding pharmacophore includes the SH group of Cys⁶ and carboxyl groups of Asp¹, Glu² and Cys⁶; and

[0245] the side chains of residues 3, 4 and 5 may enhance binding by non-specific hydrophobic interaction with NS3.

[0246] Methods

[0247] Initial Structure of the NS3-Peptide Complex

[0248] The crystal structure of NS3 with a peptide cofactor NS4A was obtained from the arts (Kim et al. (1996) Cell 87:343) and was used in the studies with peptide inhibitors. The crystal structure of NS3/NS4A was regularized using molecular mechanics described herein. Initial NS3-NS4-peptide complexes were constructed by placing the peptides into the NS3 binding site expected by structural homology to by other serine proteases:

[0249] the C-terminal carboxyl was placed near the oxyanion-stabilizing site (residues 137-139);

[0250] the side chain of Cys⁶ was inserted into the hydrophobic cavity formed by L135, F154 and A157; and

[0251] the ε-amino group of K136 was placed in contact with the C-terminal carboxyl (see, Kim et al. (1996) Cell 87:343, Steinkuhler et al. (1998) Biochemistry 37:8899).

[0252] Monte Carlo Simulations

[0253] In order to optimize the complexes, Biased Based Probability Monte Carlo (BPMC) simulations (Abagyan et al. (1994) J. Mol. Biol. 235:983) were performed on the NS3-peptide complexes using the ICM program (commercially available from MolSoft, San Diego, Calif.) with ECEPP/3 force field and atomic solvation energies (Momany et al. (1975) J. Phys. Chem. 79:2361, Nemethy et al. (1992) J. Phys. Chem. 96:6472, Abagyan et al. (1997) Computer Simulations of Biomedical Systems: Theoretical and Experimental Applications, vol. 3, ESCOM Science Publishers BV, Leiden. The sampling method was BPMC with random change of one variable at a time. A Metropolis acceptance criterion was applied after energy minimization (quasi-Newton, up to 1000 steps). Simulations were performed at a temperature of 1000° K. The peptide translational and rotational degrees of freedom, all peptide torsion angles and X angles of the protein side-chains located within 7.0 Å of any peptide atom were varied during the BPMC simulations.

[0254] The energy function used in the MC simulations included:

[0255] ECEPP/3 terms for energy in vacuo (VDW (van der Waals), H-bond, electrostatic and torsion potentials);

[0256] distance dependent electrostatics with e₀=4.0; and

[0257] surface energy with atomic solvation parameters.

[0258] The total energies of the complexes were calculated including contributions from: ECEPP/3 VDW, H-bond, S-S bond and torsion terms; exact-boundary electrostatic energy with e₀=8.0; and side-chain entropies. Hydrophobic free energies were estimated as sA, where A is accessible surface area and s is a tension constant of 0.03 kcal/mol Å².

[0259] Strategy of the Flexible Monte Carlo Docking

[0260] The simulations proceeded with multiple, relatively short MC runs (2000-5000 generated structures). New docking cycles were started from the lowest-energy or other interesting structures found in previous runs. Structures saved during various MC runs were sorted by total energies and RMSD (root-mean-squared deviation), and compressed into a cumulative conformational stack. Binding energies were calculated for representative structures of each complex thus obtained. This strategy was more efficient than continuous long simulations because the variable torsion angles and distance constraints are defined for an initial structure and do not change during the MC run.

[0261] Binding Energies of the Peptide-Protein Complexes

[0262] For low-energy conformations found after several iterative BMPC cycles, peptide-protein binding energies were estimated using the equation:

E_{bind}=E₀+E_{compl}−Eₚₑₚₜ−Eₚᵣₒₜ,

[0263] where E_{compl} is the energy of the complex, Eₚₑₚₜ & Eₚᵣₒₜ are separate energies of the peptide and protein, respectively, and E₀ is an adjustable constant.

[0264] The binding energy function included: exact-boundary electrostatic free energy contributions; side-chain entropy; and surface tension hydrophobic free energy terms. (Zhou and Abagyan (1998) Folding Design 3:513, Schapira et al. (1999) J. Mol. Recognition 12:177). ECEPP/3 hydrogen-bonding terms were included with a weight of 0.5.

[0265] Results

[0266] Models of the NS3-Peptide Complexes

[0267] RMSD between pharmacophore atoms of peptides 1 and 2 were calculated for all pairs of BPMC structures. Two models of the NS3-peptide complexes were selected assuming (1) similar positions of pharmacophore groups of two peptides in the binding site (RMSD≦2.0 Å) and (2) low binding energy of the complexes (ΔE_{bind}<5.0 kcal/mol). Two models of the NS3-peptide complex were selected by visual inspection.

[0268] Characteristics of the binding sites for peptide inhibitors in two NS3-peptide complex models are summarized in Table 1.

TABLE 1

| | Peptide | NS3 residue, | Type of | Present for Peptide | |
|---|---|---|---|---|---|
| site | residue | group | interaction | Model 1 | Model 2 |
| P1 | Cys⁶COO⁻ | K136 NH₃ + | H-bond/el. | 1, 2 | 1, 2 |
| | | G137 NH | H-bond | 1, 2 | 2 |
| | | S139 OH | H-bond | 1, 2 | 2 |
| | Cys⁶ SH | L135, F154, A157 | hydroph | 1, 2 | 1, 2 |
| P2 | Cha⁵ | H57, R155, A156 | hydroph | 1, 2 | — |
| | | A157, V158 | hydroph | — | 2 |
| P3 | Ile⁴ | V132, S133 | hydroph | 1, 2 | 2 |
| | | V158, C159 | hydroph | — | 1 |
| P4 | Leu³ | Res. 157 to 160 | hydroph | 1, 2 | 2 |
| | | V132, S133 | hydroph | — | 1 |
| P5 | Glu² COO− | R161 guanidine | H-bond/el. | — | 1, 2 |
| P6 | Asp¹ COO− | R161 guanidine | H-bond/el. | 1, 2 | — |
| | | S133 OH | H-bond | — | 1, 2 |

[0269] Validation of the Models: Modifications of the Protein and Ligands in the Binding Site

[0270] In order to validate the proposed models, the K136M mutation and peptide modifications known from SAR (structure-activity relationship) studies were performed in low-energy structures of the NS3-peptide 2 complex.

[0271] Positions of the modified ligand and conformations of adjacent protein side chains were adjusted by energy minimization. Distance restraints were applied to keep the ligand near its initial position.

[0272] Changes in calculated binding energies upon modifications, ΔE_{bind}(calc), were compared to the values expected from ratios of inhibitory potencies, ΔE_{bind}(exp).

ΔE_{bind}(exp)=RT In(IC₅₀^{mod}/IC₅₀⁰),

[0273] where IC₅₀⁰ and IC₅₀^{mod} are inhibitory potencies of the parent and modified compounds.

[0274] The correlation between experimental and calculated changes in binding energy upon ligand modifications in the binding site of NS3 is illustrated in FIG. 4.

[0275] Discussion

[0276] The two NS3-peptide complex models suggest a common binding pattern for the inhibitor P1 site (Cys⁶-OH) with the carboxyl group hydrogen-bonded to the oxyanion hole residues G137 and S139, and the Cys⁶ side chain embedded in a hydrophobic pocket formed by L135, F154 and A157.

[0277] This study confirms the possibility of hydrogen bonding between the C-terminal carboxyl and ε-amino group of K136 suggested by Steinkuhler et al. ((1998) Biochemistry 37:8899) based on the K136M mutation in NS3. Changes in calculated binding energies upon mutation are consistent with an 8-fold increase in K₁ of an inhibitor with a free carboxyl group and with the lack of an effect on binding when the peptide is amidated.

[0278] The models differ in binding of the negatively charged side chains in positions P5 and P6. The R161 guanidine interacts with a carboxyl group of Asp¹ and Glu² in Models 1 and 2, respectively. In Model 2, the Asp¹ carboxyl also interacts with the hydroxyl of S133.

[0279] The models are in agreement with SAR data for peptide inhibitors of NS3. Predicted changes in binding energy upon modification of the protein and peptides correlate reasonably well with the changes expected from IC⁵⁰ ratios. Standard deviations of ΔE_{bind}(calc)−ΔE_{bind}(exp) were 0.8 and 1.6 kcal/mol for Models 1 and 2, respectively, with correlation coefficients of 0.62. After the largest outlier was removed from each dataset, correlations improved to 0.81 and 0.76, respectively.

[0280] Conclusions

[0281] An effective iterative Biased Probability Monte Carlo protocol for the docking of flexible peptide ligands into a flexible protein active site has been developed. Two models of the complexes of HCV NS3 protease with potent peptide inhibitors were proposed based on the docking simulations and on evaluation of protein-ligand binding energies. The models were validated by in situ modifications of NS3-peptide complexes and by correlation of binding energies of modified complexes with those expected from experimental IC₅₀ values. Proposed models can be used for planning further mutagenesis studies of the HCV NS3 protease and the models can be used in the design of non-peptide inhibitors using structure-based drug design methodologies.

### EXAMPLE 2

### Lead Optimization by Receptor-Based free Energy Quantitative Structure Activity Relationships (QSARS) for Tumor Necrosis Factor (TNF) Receptor Antogonist Discovery

[0282] The goal of the modeling studies in this phase was to identify binding modes and complex structures of the compounds that bind to TNF receptor type I protein in order to guide the design of new compounds. An approach that relies on docking compounds to the receptor, evaluating free energy changes of binding of the docked structures, and comparing the calculated values with experimental inhibition constants K_{I} of the compounds was developed. The success of the calculations was assessed by evaluating the consistency of the calculated free energy changes of binding and the experimental K_{I}.

[0283] The difference in free energy changes of binding between two compounds with inhibition constants K_{I} and K_{I}′ can be calculated as,

ΔΔG=−kT InKᵢ′/K_{I}

[0284] where k and T are Boltzmann's constant and absolute temperature, respectively.

[0285] The 13 active compounds were studied. Their potencies, as measured by K_{I}, range from 0.1 to 30 μM, spanning about 3 kcal/mol in free energy. It was found that the calculated free energy changes of binding are highly consistent with the corresponding experimental values, with correlation coefficient 0.966 and difference less than 0.5 kcal/mol (see Table 2 and FIG. 4). The predicted binding modes and complex structures can thus be accepted with confidence.

[0286] To modify these compounds, important pharmacophore features on the surface of the receptor that are critical for binding of the compounds were identified. These features include a hydrophobic belt, a hydrophilic belt and 3 hydrogen bond donor sites. A few of potential hydrogen bonding sites, which are not used by the current compounds, were also derived, and can be used for designing more potent binders.

[0287] Graphics-guided redesign of the compounds was performed. The free energy calculation was used to predict the binding activity of each design. Fourteen new compounds were thus designed and binding activities were predicted. The chemical structures of the designed molecules, together with the binding modes of the lead compounds, were synthesized and shown to have high affinity for the target. Some of them exhibit a K_{I} in low-nanomolar range. Hence the method provided herein for modification of drugs for binding to calculated 3-D structures of a target protein resulted in redesigned drug candidates with enhanced affinity for the target.

[0288] This approach has advantages over the traditional x-ray crystallography method, which include the following:

[0289] (1) The binding modes are determined for a group of compounds instead of single compound; analysis of similarity and differences reveals rich information in binding mechanisms.

[0290] (2) The predictive power of the free energy calculation is very desirable for redesign of compounds.

[0291] (3) The correlation with the biochemical activities assures relevancy of the explored binding modes, while a structure given by x-ray crystallography may not necessarily be one related to the biological functions of the compound.

[0292] A comparison of calculated relative free energy changes of binding ΔΔΔ and experimental ΔΔG converted from inhibition constants K_{I} (all in kcal/mol) of the compounds (referenced by a code name) is presented in Table 2.

TABLE 2

| Compound | ΔΔA | ΔΔG |
|---|---|---|
| SBI-2030 | 0 | 0 |
| SBI-2002 | −0.97 | −1.25 |
| SBI-2005 | −0.72 | −1.14 |
| SBI-307 | −0.56 | −0.08 |
| SBI-2008 | −0.53 | −0.82 |
| SBI-2006 | −0.34 | −0.44 |
| SBI-306 | −0.07 | 0.40 |
| SBI-2000 | 0.29 | 0.27 |
| SBI-2001 | 0.72 | 1.12 |
| SBI-304 | 1.55 | 1.45 |
| SBI-308 | 1.70 | 1.78 |
| SBI-305 | 1.86 | 1.67 |
| SBI-2048 | 1.95 | 1.94 |

[0293] A comparison of calculated versus experimental binding free energy changes is given in FIG. 5.

### EXAMPLE 3

### HIV Protease Models for Drug Studies

[0294] Antiviral therapy for AIDS has focused on the discovery and design of inhibitors for two main enzyme targets of the HIV-1: reverse transcriptase (RT) and protease (PR). HIV RT is a heterodimer composed of p51 and p66 subunits. The p51 subunit is composed of the first 450 amino acids encoded by the RT gene and the p66 subunit is composed of all 560 amino acids of the RT gene. RT is responsible for RNA-dependent DNA polymerization, RNaseH activity, and DNA-dependent DNA polymerization.

[0295] HIV PR is a homodimer of two identical 99-amino acid chains. HIV PR is an aspartic proteinase that is responsible for the post-translational processing of the viral gag and gag-pol polyprotein gene products, which yields the structural proteins and enzymes of the viral particle (see, e.g., Erickson et al. (1996) Annu. Rev. Pharmacol. Toxicol. 36:545-571, Bouras et al. (1999) J. Med. Chem. 42:957-962). Despite several promising new anti-HIV agents, the clinical emergence of drug-resistant variants of HIV limits the long-term effectiveness of these drugs. Genetic analysis of the resistant forms of HIV has identified a number of critical mutations in the RT and PR genes. Moreover, structural analysis of inhibitor-enzyme complexes and mutational modeling studies can lead to a better understanding of how these drug-resistant mutations exert their effects at the structural and functional levels.

[0296] HIV-PR Inhibitor Computational Binding Studies

[0297] This example provides the results of a computational study on HIV PR. The 3-D protease structure was generated, docked with known viral inhibitors, and analyzed via free energy of binding studies described herein. A quantitative agreement between the calculated add experimental protease-drug binding energies was obtained. Moreover, a series of 3-D HIV PR models were analyzed to identify the invariant regions of the protease. These insights have implications for the design of new drugs and therapeutic strategies to combat AIDS drug resistance.

[0298] Optimization of 3D Structures

[0299] Five PR inhibitors approved by the FDA for clinical use were used: saquinavir, nelfinavir, indinavir, amprenavir, and ritonavir (FIG. 6). Initial 3-D structures for the wild-type HIV PR complexes with these FDA approved inhibitors were obtained from the Protein Data Bank and were then optimized using Monte Carlo (MC) simulations with an ECEPP/3 force field as described in Example 1. The energy function used in the MC simulations included: ECEPP/3 terms for energy in vacuo (van der Waals, H-bond, electrostatic and torsion potentials); distance dependent dielectrics with e₀=4.0; and surface free energy calculated using atomic solvation parameters ((Dudek et al. (1998) J. Computational Chem. 19:548-573, Wang et al. (1995) J. Mol. Biol. 253:473-492). Standard ECEPP charges were used for the protein residues. Lys, Arg, Glu, and Asp residues were charged. Charged and protonated states of Asp 125 (chain B) were considered as well. The inhibitors were docked into the active site of the protease, and the protein-drug complexes were energetically refined using the methods described in Example 1. Partial charges for the inhibitors were calculated with the Gasteiger-Marsili method implemented in SYBYL 6.5 (Tripos Assoc., Inc.). Different protonation states were examined for indinavir and amprenavir, but the other inhibitors were assumed to be electroneutral. Water molecules located within 7.0 Å from a ligand atom in the X-ray structure were retained in the model complex during optimization.

[0300] Calculation of Binding Energies

[0301] For low energy conformations found after several iterative BMPC cycles, protein-drug binding energies were estimated using the equation:

E_{bind}=E₀+E_{compl}−E_{ligand}−Eₚᵣₒₜ,

[0302] where E_{compl} is the energy of the complex, E_{ligand} & Eₚᵣₒₜ are energies of the ligand and protein when separated, and E₀ is an adjustable constant. The binding energies of the protein and ligand were calculated using the following energy function:

E=Eₑₗ+E_{vw}+E_{hb}+Eₛ,

[0303] where Eₑₗ is the exact-boundary electrostatic using e₀=8.0, Eₛ is the side-chain entropy term, and E_{vw} and E_{hb} are the ECEPP/3 van der Waals and hydrogen-bonding terms.

[0304] After the energies of the wild type PR-inhibitor complexes were calculated, mutation sites were introduced into the optimized X-ray structures or model complexes. The amino acid substitutions were followed by local optimization, using an ECEPP/3 force field, of protein side chains around the mutation sites via the energy minimization of substructures that included the ligand, water molecules within the sphere of radius 7.0 Å around the ligand, and protease residues within the sphere of radius 3-5 Å around the mutated residues. The energy of binding of the mutated complex was calculated based on the equation described herein. The difference in binding energy resulting from mutations (mut) of the wild-type (WT) protease were calculated using the following equation:

ΔE_{bind}(calculated)=E_{bind}(WT)−E_{bind}(mut).

[0305] This change in binding energy was compared to data from experimental (exptl) studies (Gulnik et al. (1995) Biochemistry 35:9282-9287, Klabe et al. (1998) Biochemistry 37:8735-8742, Pazhanisami et al. (1996) J. Biol. Chem. 271:17979-17985, Jacobsen et al. (1995) Virology 206:527-534, Maschera et al. (1996) J. Biol. Chem. 271:33231-33235) based on the equation:

ΔE_{bind}(exptl)=RTIn(K_{I}mut/K,wt).

[0306] Plots of ΔE_{bind}(calculated) vs. ΔE_{bind}(exptl) were generated, and the results, summarized in Table 3, show a strong correlation between the calculated binding energies and the experimentally determined binding energies for the PR-inhibitor complexes. For example, the correlation coefficient R for PR-ritonavir and PR-amprenavir is 0.9, where R=1 denotes congruency between the computationally calculated and experimentally determined binding energy data. These correlation data validate the computational protocol and calculations described herein as a method for predicting protein-drug binding or protein-drug resistance (i.e. non-binding). The evaluation of changes in binding energy of protein-drug complexes upon protein sequence variations can be used as a possible descriptor and, thus, can be used to predict the efficacy of drugs on proteins resulting polymorphisms in genes. Moreover, the analysis of the free energy of binding in complexes between the protein models that are produced by the method set forth in this example and drugs that have been designed or modified is a good predictive tool for drug designers.

TABLE 3
Correlation between Experimental and Calculated Binding Energies
for HIV Protease Inhibitors

| HIV | X-ray | No of exptl. | Correlation | Correlation |
|---|---|---|---|---|
| PRInhibitor | Complex ID | data points | coefficient R | S.D., kcal/mol |
| Saquinavir | 1HXB | 18 | 0.84 | 0.68 |
| Indinavir | 1HSG | 17 | 0.79 | 0.80 |
| Ritonavir | 1HXW | 12 | 0.90 | 0.72 |
| Amprenavir | 1HPV | 15 | 0.90 | 0.54 |

| | | |
|---|---|---|
| Nelfinavir | 1OHR | Insufficient data |

[0307] Identification of Structural Invariant Regions of HIV Protease

[0308] Clinical effectiveness of HIV PR inhibitors is limited by the rapid emergence of drug-resistant mutations. Resistant PR variants first occur by the mutation of amino acids close to or in and around the drug binding site, which are then accompanied by compensatory mutations of more distant amino acids. The identification of highly conserved, structural invariant regions of a PR would provide new potential targets and thus lead to the development of therapeutics having greater clinical efficacy than those drugs commonly employed to treat HIV.

[0309] The protein sequences of HIV protease were obtained from GenBank and from the blood samples of patients using standard isolation and sequencing techniques well known in the arts. The protein sequences were modeled into 3-D structures using the computational protocol described in Example 1. The protease sequences were aligned, and the frequency of mutation, regardless of type, was determined at each amino acid position and plotted in FIG. 7, where the frequency of mutation in this set of HIV-1 Protease sequences varied from 0 to 40%. Sequence alignment also revealed how many different types of amino acids could be substituted in any specific residue, yielding the tolerance of each residue to substitutions of different types. The data showing the frequency of mutation of each residue out of PR sequences, the types of mutations, and the distance of the mutating residue from the active site (Asp 28) are shown in FIG. 8. This information, sequences obtained from 10591 different genotypes, was used to identify invariant and/or highly conserved regions of PR and to map these regions to a 3-D structure for the purpose of identifying new potential regions on the protein as targets for therapeutic intervention. These invariant regions include, but are not limited to, residues 1-9, 25-29, 49-52, 78-81, and 94-99, where residue 1 is an aliphatic amino acid, more preferably proline; residue 2 is a hydrophilic amino acid, more preferably glutamine; residue 3 is an aliphatic amino acid, more preferably isoleucine; residue 4 is a hydrophilic amino acid, more preferably threonine; residue 5 is a hydrophobic amino acid, more preferably leucine; residue 6 is an aromatic amino acid, more preferably tryptophan; residue 7 is a hydrophilic amino acid, more preferably glutamine; residue 8 basic amino acid, more preferably arginine; residue 9 is an aliphatic amino acid, more preferably proline; residue 25 is a hydrophilic amino acid, more preferably aspartic acid; residue 26 is a hydrophilic amino acid, more preferably threonine; residue 27 is an aliphatic amino acid, more preferably glycine; residue 28 is an aliphatic amino acid, more preferably alanine; residue 29 is an acidic amino acid, more preferably aspartic acid; residue 49 is an aliphatic amino acid, more preferably glycine; residue 50 is a hydrophobic amino acid, more preferably isoleucine; residue 51 is an aliphatic amino acid, more preferably glycine; residue 52 is an aliphatic amino acid, more preferably glycine; residue 78 is an aliphatic amino acid, more preferably glycine; residue 79 is an aliphatic amino acid, more preferably proline; residue 80 is a hydrophilic amino acid, more preferably threonine; residue 81 is an aliphatic amino acid, more preferably proline; residue 94 is an aliphatic amino acid, more preferably glycine; residue 95 is a thio-containing amino acid, more preferably cysteine; residue 96 is hydrophilic amino acid, more preferably threonine; residue 97 is hydrophobic amino acid, more preferably leucine; residue 98 is hydrophilic amino acid, more preferably asparagine; and residue 99 is an aromatic amino acid, more preferably phenylalanine. These invariant regions can subsequently be used to assist in the design drugs or therapeutic agents which bind to the invariant regions and disrupt the activity of the protease with greater efficacy than drugs commonly used to treat HIV and where the free energy of binding between said drug or therapeutic agent and the structural invariant region is evaluated as described herein. The methods described in this example can also be applied to HIV RT and to any protein of interest that exhibits polymorphisms.

### EXAMPLE 4

[0310] Computational Phenotyping of HIV-1 Protease and Reverse Transcriptase Computational or in silico phenotyping is performed to assess phenotypic properties of a protein. This example demonstrates application of this method to HIV-1 protease and reverse transcriptase to test whether the efficacy of various protease inhibitors for an HIV patient.

[0311] To practice this method 3-D structures of HIV-1 protease and reverse transcriptase based upon the nucleic acid isolated from HIV from a patient are generated. Protein-drug binding analysis in silico in order to determine whether drug binding does (i.e. sensitivity) or does not (i.e. resistance) take place.

[0312] Sequencing of HIV-1 Protease and Reverse Transcriptase is performed on HIV-1 cDNA following extraction, reverse transcription, and PCR amplification of viral RNA obtained from patient specimens, such as blood samples or other body fluid or tissue samples. Methods for the extraction, reverse transcription, and PCR amplification of viral RNA are well known in the art. For each sequence, a computer-generated 3-D structure of the protein is modeled and then docked with antiviral drugs in silico using methods described in Example 1 and elsewhere herein to analyze protein-drug interactions. Antiviral drugs that can be tested include, but are not limited to, saquinavir, indinavir, ritonavir, amprenavir, and nelfinavir for HIV protease; zidovudine, lamivudine, stavudine, zalcitabine, didanosine, abacavir, adefovir, delavirdine, nevirapine, and efavirenz for HIV reverse transcriptase; and any FDA-approved or non-FDA approved antiviral drug. From these protein-drug interaction studies, relative drug resistance or sensitivity is inferred by calculating and evaluating the free energy of binding in low energy conformations of complexes between the variant protease structure and docked antiviral drug or variant reverse transcriptase structure and docked antiviral drug, using the methods described in Examples 1 and 3 and elsewhere herein.

[0313] The results of the computational phenotyping procedure can be presented as a patient report that states whether a drug or drugs are sensitive or resistant to the RT or PR obtained from the patient. Such a patient report assists physicians in selecting appropriate drugs for HIV patients. It also is useful for the in vitro diagnostics industry in an adjunct test/service capacity to help optimize antiviral therapy.

### EXAMPLE 5

### HIV Protease and Reverse Transcriptase Databases

[0314] Exemplary databases of the 3-D protein structures of polymorphic variants are described in this example. The HIV PR and RT databases are a comprehensive collection of 3-D polymorphic structural data along with related information, including nucleic acids encoding all or a portion of the protein. These data provide a means to understand differences in the interactions between a drug or drugs and the structural variations of the drug targets. This example describes the creation, interface for, and use of structural variant databases of HIV protease and reverse transcriptase polymorphic variants.

[0315] Construction of Databases

[0316] To implement the RT or HIV database described herein, suitable computer for performing database server tasks includes a “Pentium” level CPU having at least 128 MB of memory, 30 GB of disk storage, and 256 MB of disk swap space for files. A recommended configuration for better computer performance would include, for example, a “Pentium III” processor at 700 MHz or faster, memory of 256 MB or greater, disk storage space of 50 GB or more, and swap space of 500 MB or more. A suitable configuration for performing user tasks as described above includes a “Pentium” level CPU having 128 MB memory, disk space of 240 MB with swap space of 256 MB, and an optional display circuit card supporting OpenGL and having 4 MB of memory. A recommended configuration for better performance would include, for example, a “Pentium III” processor at 500 MHz or faster, memory of 256 MB or greater, disk space of 500 MB or more, swap space of 500 MB or more, and an optional display card having 8 MB of memory or more, supporting resolution of 1024×768.

[0317] Preferably, the software used in the computing system described above includes, for the server machine, operating system software such as “Windows NT Server 4.0” from Microsoft Corporation, with Service Pack 5, Version 1280 (10 Jun. 1999) or more recent, with database management server software such as “Oracle Server Standard Edition 8.1” from Oracle Corporation, or better. The software used in a preferred embodiment of the user machine includes operating system software such as “Windows NT Workstation 4.0” from Microsoft Corporation, with Service Pack 5, version 1280 (10 Jun. 1999) or more recent, as well as “Oracle Client Standard Edition Version 8.1” or better. The client machine will also be compliant with the “Java” programming language (Java Runtime Environment 1.2.2). As will be known to those skilled in the art, other configurations may be suitable, depending on the applications being used and the computer performance desired.

[0318] Database Interface

[0319] The database interface was a Java-based interface with useful features. The database is interfaced to a molecular graphics package that includes 3-D visualization, including wire-frame representations; secondary structure ribbons; and solid surfaces, and structure analysis tools. The database also provides an interface to access all of the collected files from the same 3-D structure. The database interface also provides access to other databases, such as databases of chemical structures and public domain databases such as GenBank and the Protein Data Bank. The OpenGL and C++ module has real-time interaction with the sequence display and sequence analysis modules, such that highlighting residues in one display results in highlighting those same residues in other displays.

[0320] The relational database containing the protein information may be structured according to relational objects to facilitate the analysis and computation processes described in the preceding examples. FIG. 10 is a graphical representation of the database objects for the system described herein. The database is organized by classes, each of which is characterized by data attributes and subclasses for the proteins.

[0321] FIG. 10 shows that the database design includes classes comprising Variant and related classes of Sample, Residue, Model, Resistance_Entry, and Protein. Other classes include Conformation, Residue_Conformation, Atom, Drug, Family, and Subfamily. These classes store attribute data values and specify class parameters and behaviors to provide the functionality described herein.

[0322] For example, FIG. 10 shows that the Variant class stores parameters to specify a variant, including subclasses that specify a Variant_ID, Sample_ID, Protein_ID, Name, and Sequence, where Variant_ID is the identification number of the variant; Sample_ID is the identification number of the sample from which HIV PR and RT were obtained; Protein_ID is the identification number of the protein i.e. PR or RT; Name is the name of the variant distinguishing it from other variants encoded by the same DNA due to ambiguities in the nucleic acid sequence; and Sequence is the nucleotide or amino acid sequence. Similarly, FIG. 10 shows that the Sample class includes subclasses relating to a specific sample and which specify Sample_ID, Sample_Date, Sex, Ambiguity_Number, Distance, Sequence_Length, Sequence, Clade, and Region, where Sample_ID is as defined herein; Sample_Date is the date the sample was obtained; Sex is the gender of the sample donor; Ambiguity_Number is fraction of ambiguous nucleotide positions; Distance is a normalized number the variation of an amino acid from the master lade; Sequence_Length is the length of the sequence; Sequence is as defined herein; Clade is the master sequence; and Region is the geographic location from which the sample was obtained. The Model class includes subclasses comprising Model_ID, Model_Name, Variant_ID, and Drug_ID, where Model_ID is the identification number of the 3-D protein model; Model_Name is the name of the 3-D protein model; Variant_ID is as defined herein; and Drug_ID is the identification number of the drug i.e. antiviral drug. The atom class includes the subclasses comprising Atom_Name, Residue_Conformation_ID, X_Coordinate, Y_Coordinate, and Z_Coordinate, where Atom_Name is the name of atom in the 3-D protein structure; Residue_Conformation_ID is the identification number of the amino acid conformation in a 3-D structure; and X_Coordinate, Y_Coordinate, and Z_Coordinate are the coordinates of the 3-D protein structure. The conformation class includes the subclasses comprising Conformation_ID, Model_ID, and Refinement_Level, where Conformation_ID is the identification number of a conformation of a 3-D structure; Model_ID is as defined herein, and Refinement_Level is the number of times the conformation was refined energetically. The drug class includes the subclasses comprising Drug_ID, Profile, Symbol, Name1, Name2, Company, and URL, where Drug_ID is as defined herein; Symbol is the FDA symbol for the drug; Name1 is the name of the drug, Name2 is an alternative name of the drug; Company is the company that makes the drug; and URL is the website address of the company that makes the drug. The residue_conformation class includes the subclasses comprising Residue_Conformation_ID, Conformation_ID, and Residue_ID, where Residue_Conformation_ID is as defined herein; Conformation_ID is as defined herein; and Residue_ID is the identification number of the amino acid. The Resistance_Entry class includes the subclasses comprising Resistance_Entry_ID, Profile, Protein_ID, Residual_Number, Amino_Acid, Weight, and Maximum_Weight, where Protein_ID is as defined herein, Amino_Acid is the amino acid. The Family class includes the subclasses comprising Family_ID and Family_Name, where Family_ID is the identification number of the protein family and Family_Name is the name of the protein family. The SubFamily class includes the subclasses comprising SubFamily_ID, SubFamily_Name, and Family_ID, where SubFamily_ID is the identification number of the protein subfamily, SubFamily_Name is the name of the protein subfamily, and Family_ID is as defined herein. The Protein class includes the subclasses comprising Protein_ID, Protein_Name, Species, Multiple_Domain, Multiple_Chain, and Wild_Type, where Protein_ID is as defined herein, Protein_Name is the name of the protein i.e. RT or PR; Species is the species of the source of the protein i.e. humans; Multiple_Domain is the domain of the protein i.e. p66 or p51 in the case of RT; Multiple_Chain is the a or b chain in the dimers of RT and PR; and Wild_Type is the wild-type protein sequence for RT and PR. The residue class includes the subclasses comprising Residue_ID, Variant_ID, Residue_Number, Insertion_Code, and Residue_Code, where Residue_ID is the identification number of the amino acid, Variant_ID is as defined herein, Chain, Residue_Number is the numbering of an amino acid in a protein sequence, Insertion_Code is the identification number if different insertions occur in the amino acid sequence, and Residue_Code is the single letter or 3-letter code of an amino acid. Those skilled in the art will understand the database design exemplified in FIG. 10. It should be understood that other classes or parameters may be included, as selected by those skilled in the art, for the desired database design.

[0323] Database Content

[0324] The databases contain information on the variants of HIV PR and RT present in patient populations. The master amino acid sequence, nucleic acid sequence, and 3-D structure are obtained from GenBank; an exemplary master sequence is set forth in SEQ ID No. 118. Nucleotide sequences exhibiting polymorphisms and the corresponding structural variant protein sequences are determined by isolating nucleic from viruses and viral nucleic acid obtained from the blood samples of patients throughout the US, as well as from other countries, using sequencing methods well known in the art. The sequences were inputted into the RT and PR databases. Exemplary of the nucleotide sequences and the encoded amino acids for HIV RT and PR in this data base are set forth in SEQ ID NOS. 3 to 117, where r is g or a; y is t/u or c; m is a or c; k is g or t/u; s is g or c; w is a or t/u; b is g or c or t/u; d is a or g or t/u; h is a or c or t/u; v is a or g or c; and n is a or g or c or t/u or unknown or other. The amino acid sequences of the wild type and structural variants are used to create 3-D protein structures which are deposited into the databases.

[0325] 1. 3-D Protein Models

[0326] The structure of the wild-type or master sequence model of PR and RT were obtained from the crystal structures found in PDB. The initial structure was refined energetically using BPMC with an ECEPP force field as described in Example 1. The quality of the model was assessed by calculating Normalized Residue Energies (NREs), where models with eₐᵥ23 1.5 require further energetic refinement; and models with eₐᵥ<1.5 were deposited into the database as described herein. The 3-D protein structures of the variant sequences were generated by comparing these structures to the master sequence (see, e.g., SEQ ID No. 118; i.e., homology modeling) and energetically refining the models ab initio, using the same force field and BPMC procedure as the master sequence and applying the same quality control standard as described herein. FIG. 11 is a tabulation of the 3-D coordinates of an exemplary HIV PR entry in a database that includes 3-D structures. For US purposes and where permitted, Tables 4 and 5 are provided electronically on CD ROM. These Tables house the coordinates that represent the 3-D protein structures of proteins encoded by the nucleic acids set forth in SEQ. ID. NOS. 3-117. It will be noted that these sequences encode a full length PR and about 200 nucleotides the p51 subunit, which is the subunit of interest herein. To construct the full-length 3-D structure, the 3-D structure of each encoded portion of the p51 subunit was generated and then combined with the structure of the master sequence to produce a full-length structure.

[0327] These 3-D structures in the database can be selected and exported into computational docking programs for analyzing protein-drug interactions on known drugs, new drugs or modified drugs. The database can be mined to find protein models that correspond to patients with a particular genetic polymorphism, patients with the most commonly occurring polymorphism, to a relevant patient subpopulation (e.g., gender, age, race, or other characteristic), to patients receiving a specific treatment regimen, to patients exhibiting a particular clinical response, to structural invariants, or to other relevant criteria. Drugs can be docked into the active sites of PR and RT and subsequently energetically refined using an ECEPP force field and BPMC as described in Example 1. The quality control is that the protein-drug complex represents a low energy conformation, which may take several iterative BMPC cycles. Then, the binding energies of the protein-drug complexes can be estimated using the methods of Example 1. Drug designers can modify the structures of drugs or design new drugs, using methods well known in the arts, to maximize the drug binding to the models generated by this database.

[0328] 2. Other Data

[0329] Each PR or RT nucleotide sequence in the database has associated with it an identification number, the nucleotide sequence length, the translated amino acid sequence (or sequences in cases of ambiguous nucleotide positions), a 3-D structure for each amino acid sequence (from which a number of structurally related values are calculated), the genotyping date, the gender of the patient, the geographical location from which the sample was sent, the lade of the sequence, the fraction of ambiguous nucleotide positions, drug information, and other clinical information.

[0330] Database Usage

[0331] A query menu allows the user to retrieve data based on the various fields: sample ID, residue number (with or without specific amino acid mutation), date gender, geographic location, distance from the master sequence, and other useful queries. The set of sequences that satisfies the user's query are brought up in a sequence display module, which have variations from the master sequence indicated initially, although the sequences can be highlighted according to predicted resistance. This subset of sequences can be subjected to further analyses. For example, a histogram summarizing the number of mutations at each position in the subset can be generated. The 3-D structures for any of the variants in the database can be displayed and analyzed in the structure visualization module, allowing the user to compare the similarities and differences between 3-D structures by superimposing the 3-D structures. The user and also export these structures into programs for protein-binding studies as described herein. Thus, by mining the databases, a user will access 3-D structures and clinical and sample information that can be used in and correlated with protein-drug binding studies of HIV PR and RT.

[0332] Database Applications

[0333] The HIV PR and RT databases have many applications. The applications include, but are not limited to, any application and method provided herein, such as databases that assist in de novo drug design and drug binding calculations. In particular, the database can be used in the design of 2nd and 3rd generation drugs to combat potential resistance to HIV therapy, and it can be used in the design of drugs that will impact a broad spectrum of the infected population. The databases provide the ability to design drugs that focus on the most highly conserved regions of a drug target and drugs that will avoid resistance to mutation. The database could be used to rank drug candidates by likely efficacy within a given subpopulation of patients (e.g. age, race, gender) in pre-clinical trials and to predict the most effective drug regimen to give a patient, and for designing clinical trials.

[0334] Since modifications will be apparent to those of skill in this art, it is intended that this invention be limited only by the scope of the appended claims.

The application's sequence listing, which the Patent Office published only in electronic form, follows.

SEQUENCE LISTING (118 sequences)

SEQ ID NO: 1 - protein, 6 aa, Artificial Sequence
  Modified Hepatitis C Virus NS3 Protease Inhibitor Peptide
  ACETYLATION 1
  VARIANT 2: Xaa = D-glutamic acid
  VARIANT 5: Xaa = beta-cyclohexylalanine
  ref <301>: AUTHORS: Ingallinella, P., Altamura, S., Bianchi, E., Talia
  ref <302>: TITLE: Potent Peptide Inhibitors Of Human Hepatitis C Vir
  ref <303>: JOURNAL: Biochemistry
  ref <304>: VOLUME: 37
  ref <305>: ISSUE: 25
  ref <306>: PAGES: 8906-8914
  ref <307>: DATE: 1998-06-23
DXLIXC

SEQ ID NO: 2 - protein, 6 aa, Artificial Sequence
  Modified Hepatitis C Virus NS3 Protease Inhibitor Peptide
  ACETYLATION 1
  VARIANT 5: Xaa = beta-cyclohexylalanine
  ref <301>: AUTHORS: Ingallinella, P., Altamura, S., Bianchi, E., Talia
  ref <302>: TITLE: Potent Peptide Inhibitors Of Human Hepatitis C Vir
  ref <303>: JOURNAL: Biochemistry
  ref <304>: VOLUME: 37
  ref <305>: ISSUE: 25
  ref <306>: PAGES: 8906-8914
  ref <307>: DATE: 1998-06-23
DELIXC

SEQ ID NO: 3 - DNA, 1045 bp, Human Immunodeficiency Virus (HIV)
  CDS (1)...(297): Protease
  CDS (298)...(1045): Portion of Reverse Transcriptase
  VARIANT 10, 23: Xaa = Leu
  VARIANT 266: Xaa = Ile
cctcagatcactctttggcaacgacccctygtcacaataaagatagggggccaactaaaagaagctytattagatacaggagcagatgatacagtattagaagaaatgagtttaccagggaaatggaaaccaaaaatgatagggggaattggaggttttatcaaagtaagacagtatgatcaaatactcatagaaatctgtggacataaagctataggcacagtattagtaggacctacacctgtcaacataattggaagaaatttgttgactcagattggttgcactttaaatttgcccattagtcctattgaaactgtaccagtaaaattaaagccaggaatggatggcccaaaagttaaacaatggccattgacagaagaaaaaataaaagcattagtagaaatttgtacagaaatggaaaaggaaggaaaaatttcaaaaattgggcctgagaatccatacaatactccaatatttgccataaagaaaaaagacagtactaaatggagaaaattagtagatttcagagaacttaataagagaacacaagacttctgggaagttcaattaggaataccacaccccgcagggttaaaacagaaaaaatcagtaacaatactggatgtgggtgatgcatatttttcagttcccttagatgaaggcttcaggaagtatactgcatttaccatacctagtagaaataatgagacaccagggattagatatcagtacaacgtgctcccacagggatggaaaggatcaccagcaatatttcaaagtagcatgacaagaatyttagagccttttagaaaacaaaatccagaaatagttatctatcaatacatggatgatttgtatgtaggatctgacttagaaataggacagcatagagcaaaaatagaggaactgagaggacatctattaaagtggggatttaccacaccagacaaaaaacatcagaaagaacctccatttctttggatgggttatgaactccatcctgataaatggacagtacagcctataaagttgccagaaaaag

SEQ ID NO: 4 - DNA, 1046 bp, Human Immunodeficiency Virus (HIV)
  CDS (1)...(297): HIV Protease
  CDS (298)...(1046): Portion of HIV Reverse Transcriptase
  VARIANT 66: Xaa = Ile
cctcagatcactctttggcaacgaccccttgtcacaataaagataggagggcagctaaaggaagctctattagatacaggagcagatgatacagtagttgaagaaatgaatttgccaggaaaatggaaaccaaaaatgatagggggaattggaggttttatcaaagtaagacagtatgagcaaatagccgtagaaatytgtggacatagagctatgggtacagtattagtaggacctacacctgtcaacataattggaagaaatctgttgactcagattggttgcactttaaattttcccattagtcctattgaaactgtaccagtaaaattaaagccaggaatggatggcccaaaagttaaacaatggccattgacagaagaaaaaataaaagcattagtagaaatctgtacagaattggaaaaggaagggaaaatttcaaaaattgggcctgaaaatccatacaatactccagtatttgccataaagaaaaagaacagtactaaatggagaaaattagtagatttcagagaacttaataagagaactcaagacttctgggaggttcaattaggaataccacatccagcagggttaaaaaagaataaatcaataacagtactggatgtgggtgatgcatatttttcagttcccttatgtgaagacttcaggaagtatactgcatttaccatacctagtgtaaacaatgagactccagggattagatatcagtacaatgtgcttccacagggatggaaaggattcaccagcatattccaatgtagcatgacaaaaatcttagagccttttagaaaacaaaatccagagatagttatctatcaatacatggatgatttgtatgtaggatctgacttagaaatagggcagcatagagcaaaaatagaggaactgagacaatatctgtggaagtggggattttgcacaccagaacaaaarcatcagaaagaacctcctttcctttggatgggttatgaactccatcccgataaatggacagtacaacctatagtgctgccagacaaaga

SEQ ID NO: 5 - DNA, 1104 bp, Human Immunodeficiency Virus (HIV)
  CDS (1)...(297): HIV Protease
  CDS (298)...(1104): Portion of HIV Reverse Transcriptase
  VARIANT 15, 71: Xaa = Ile or Val
  VARIANT 138: Xaa = Pro or Thr
cctcagatcactctttggcaacgacccatcgtcacaataaagrtaggggggcaactaagggaagctctattagatacaggagcagatgatacaataatagaagacataactttgccaggaagatggacaccaaaaatgatagggggaattggaggttttgtcaaagtaagacagtatgatcagatacccatagaaatctgcggacataaarttataagtacagtattggtaggacctacaccaataaacatagttggaagaaatctgatgactcagattggttgcactttaaattttcccattagtcctattgaaactgtaccagtcaaattaaagccaggaatggatggcccaaaagttaaacaatggccattgacagaagaaaaaataaaggcattagtagaaatttgtmcagaactggaaatggatggaaaaatttcaaaaattgggcctgaaaatccgtacaatactccagtatttgccataaagaaaaagaacagtactaaatggagaaaattagtagatttcagagaacttaacaaaagaactcaagacttctgggaagttcaattaggaataccacatcccgcagggttaaagaagaaaaaatcagtaacagtactggatgtgggtgatgcatatttttcaattcccttatgtgaagacttcagaaagtatactgcatttaccatacctagtataaacaatgagacaccagggattagatatcagtacaatgtgcttccacagggatggaaaggatcaccagcaatattccaaagtagcatgacaaaaatcttagagccttttagaaaacagaatccagaaatggtcatctatcaatacgtggatgatttgtatgtaggatctgacttagaaatagagcagcatagaacaaaaatagatgaactgagacaatatctgtggaagtggggattttacacaccagacaaaaaacatcagacagaacctccattcctttggatgggttatgaactccatcctgataaatggacagtacagcctatagtgctgccagaaaaagacagctggactgtcaatgacatacagaagttagtgggaaaattgaattgggcaagtcag

SEQ ID NO: 6 - DNA, 1116 bp, Human Immunodeficiency Virus (HIV)
  CDS (1)...(297): HIV Protease
  CDS (298)...(1116): Portion of HIV Reverse Transcriptase
cctcaaatcactctttggcaacgacccctcgtcacaataaagataggggggcaactaaaggaagctctattagatacaggagcagatgatacagtattagaagatatgaatttgccaggaagatggaaaccaaaaatgatagggggaattggaggttttatcaaagtaaggcagtatgatcaaatactcatagaaatctgtggacataaagctataggtacagtattagtaggacctacacctgtcaacataattggaaggaatctgttgactcagattggttgcactttaaattttcccattagtcctattgaaactgtaccagtaaaattaaagccaggaatggatggcccaaaagttaaacaatggccattgacagaggagaaaataaaagcattagtagaaatctgtacagaaatggaaaaggaagggaaaatttcaaaaattgggcctgaaaatccatacaatactccagtatttgccataaagaaaaaagacagtactaaatggagaaaattagtagatttcagagaacttaataagaaaactcaagacttctgggaagttcaattaggaataccacatcccgcagggttaaaaaagaaaaagtcagtaacagtactggatgtgggtgatgcatatttttcagttcccttagataaagacttcaggaagtacactgcatttactatacctagtataaacaatgagacaccagggattagatatcagtacaatgtgcttccacagggatggaaaggatcaccagcaatattccaaagtagcatgataaaaatcttagagcctttcagaaaacaaaatccagacatggtcatctatcaatacatggatgatttgtatgtaggatctgacttagaaataggacagcacagaacaaaaatagaggaactgagacaacatctgttgaagtggggatttaccacaccagacaagaaacatcagaaagaacctccattcctttggatgggttatgaactccatcctgataaatggacagtacagcctataaagctgccagaaaaagacagctggactgtcaatgacatacagaagttagtgggaaaattaaattgggcaagtcagatttacccaggg

SEQ ID NO: 7 - DNA, 1116 bp, Human Immunodeficiency Virus (HIV)
  CDS (1)...(297): HIV Protease
  CDS (298)...(1116): Portion of HIV Reverse Transcriptase
  misc_feature 108: n = a, c, t, or g
  VARIANT 36: Xaa = Ile or Met
  VARIANT 66: Xaa= Ile
cctcagatcactctttggcaacgaccccttgtcacaataaarataggggggcaactaaaggaagctctattagatacaggagcagatgatacagtattagaggaaatnaatttaccaggaagatggaaaccaaaaatgatagggggaattggaggttttatcaaagtaagacagtatgatcagatacttgtagaaatytgtggacataargctataggtacagtattagtaggacctacacccgtcaacataattggaagaaatctgttgactcaaattggttgcactttaaattttcccattagtcctattgaaactgtaccagtaaaattaaagccgggaatggatggccccaaagttaaacatggccctttgacagaagaaaaaataaagcctttagttgaaatttgtacagaaatgggaaaagaagggaaaatttcaaaaattgggcctgaaaatccatacaatactccagtatttgccataaagaaaaaagacagtactaaatggagaaaattagtagatttcagagaacttaataaaagaactcaagacttytgggaagtccaattaggaataccacatccctcagggttaaaaaagaaaaaatcagtaacagtactggatgtgggtgatgcatatttttcagttcccttggatgaagacttagagaagtatactgcatttaccatacctagtataaacaatgagacaccagggattagatatcagtacaatgtgcttccacagggatggaaaggatcaccagcaatattccaaagtagcatgacaaaaatcttagagccttttagaaaacaaaatccagacatagttatctatcaatacatggatgatttgtatgtaggatcagacttagaaatagggcagcatagaacaaaaatagaggaactgagacaacatctgttggggtgggggtttaccacaccagacaaaaaacatcagaaagaacctccattcctttggatgggttatgaactccatcctgataaatggacagtacagcctatagtgctgccaacaaaagacagctggactgtcaatgacatacagaagttagtgggaaaattgaactgggcaagtcagatttatgcaggg

SEQ ID NO: 8 - DNA, 1116 bp, Human Immunodeficiency Virus (HIV)
  CDS (1)...(297): HIV Protease
  CDS (298)...(1116): Portion of HIV Reverse Transcriptase
  VARIANT 10, 23: Xaa = Leu
cctcagatcactctttggcaacgacccctygtcacagtaaagataggggggcaaataaaggaagctytattagatacaggagcagatgatacagtattagaagaaatgaatttgccaggaagatggaaaccaaaaataatagggggaattggaggttttatcaaagtaagacagtatgatcaggtacccatagaaatctgtggacaaaaagctataagtacagtattagtaggacctacacctgtcaatataattggaagaaatctgatgactcagattggttgcactttaaattttcctattagtcctattgaaactgtaccagtaaaattaaagccaggaatggatggcccaagagttaaacaatggccattgacagaagaaaaaataaaagcattagtagaaatctgtacagaaatggaaaaggaagggaaaatttcaaaaattgggcctgaaaatccatacaatactccagtatttgccataaagaaaaaaggcagtaacagatggagaaaattagtagatttcagagaacttaataagaaaactcaagacttctgggaagttcaattaggaataccacatcccgcagggctaaaaaagaaaaaatcagtaacagtactggatgtgggtgatgcatatttttcagttcccttagataaagaattcaggaagtatactgcatttaccatacctagtacaaacaatgagacaccagggattagatatcagtacaatgtgcttccacaaggatggaaagggtcaccagcaatattccaaagtagcatgacaaaaatcttagagccttttagaaaacaaaatccagacatagttatctatcaatacatggatgatttgtatgtaagctctgacttagaaatagggcagcatagaacaaaaatagaggaactaagacaacatctgttgaggtggggattaaccacaccagacaaaaaacatcagaaagaacctccattcctttggatgggttatgaactccatcctgataaatggacagtacagcctatagtgctgccagaraaagacagctggactgtcaatgacatacagaagttagtgggaaaattgaattgggcaagtcaaatttacccaggg

SEQ ID NO: 9 - DNA, 1116 bp, Human Immunodeficiency Virus (HIV)
  CDS (1)...(297): HIV Protease
  CDS (298)...(1116): Portion of HIV Reverse Transcriptase
  VARIANT 10: Xaa = Leu
  VARIANT 85: Xaa = Ile
  VARIANT 290: Xaa = Ser
  VARIANT 10: Xaa = Gly
cctcagatcactctttggcaacgacccctygtcaaagtaaagataggggggcaactaaaggaagctctattagatacaggagcagatgatacagtattagaagaaatgaatttgccaggaagatggaaaccaaaaatgatagggggaattggaggttttatcaaagtaagacagtatgatcagatacccatagaaatctgtggacataaagctataggtacagtattagtaggacctacacctgtcaacataatwggaagaaatctgttgactcagattggttgcactttaaattttcccattagtcctattgaaactgtaccagtaaaattaaagccaggaatggatggcccaaaagttaaacaatggccattgacagaagaaaaaataaaagcattaatagaaatttgtacagagatggagaaggaagggaaaatttcaaaaattgggcctgaaaatccatacaatactccagtatttgccataaagaaaaaagacagtactaaatggagaaaattagtagatttcagagaacttaataagaaaactcaagayttctgggaagttcarttaggaataccacatcccgcagggttaaaaaagaaaaaatcagtaacagtactggatgtgggtgatgcatatttttcagttcccttagataaagacttcaggaagtatactgcatttaccatacctagtgtaaacaatgagacaccagggattagatatcagtacaatgtgcttccacagggatggaaaggatcaccagcaatattccaaagtagcatgacaaagatcttagarccttttagaaaacaaaatccagaaatagttatctatcaatacatggatgatttgtatgtaggatcwgacttagaaatagggcaacatagaataaaaatagaggaactgagacagcatctgttaaggtgggggtttaccacaccagacaaaaaacatcagaaagaacctccattcctttggatgggktatgaactccatcctgataaatggacagtacagcctatagtgctgccagaaaaagayagctggactgtcaatgacatacagaagttagtgggaaaattgaattgggcaagtcagatctacccaggg

SEQ ID NO: 10 - DNA, 1116 bp, Human Immunodeficiency Virus (HIV)
  CDS (1)...(297): HIV Protease
  CDS (298)...(1116): Portion of HIV Reverse Transcriptase
  VARIANT 23: Xaa = Leu
  VARIANT 46: Xaa = Ile
  VARIANT 248: Xaa = Pro
  VARIANT 276: Xaa = Leu or Val
cctcagatcactctttggcaacgacccctcgtcacagtaaagataggggggcaaataaaggaagctytattagatacaggagcagatgatacagtattagaagaaatgaatttgccaggaagatggaaaccaaaaatwatagggggaattggaggttttatcaaagtaagacagtatgatcaggtacccatagaaatctgtggacaaaaagctataagtacagtattagtaggacctacacctgtcaatataattggaagaaatctgatgactcagattggttgcactttaaattttcctattagtcctattgaaactgtaccagtaaaataaaagccaggaatggatggcccaagagttaaacaatggccattgacagaagaaaaaataaaagcattagtagaaatctgtacagaaatggaaaaggaagggaaaatttcaaaaattgggcctgaaaatccatacaatactccagtatttgccataaagaaaaaaggcagtaacagatggagaaaattagtagatttcagagaacttaataagaaaactcaagacttctgggaagttcaattaggaataccacatcccgcagggctaaaaaagaaaaaatcagtaacagtactggatgtgggtgatgcatatttttcagttcccttagataaagaattcaggaagtatactgcatttaccatacctagtacaaacaatgagacaccagggattagatatcagtacaatgtgcttccmcaaggatggaaagggtcaccagcaatattccaaagtagcatgacaaaaatcttagagccttttagaaaacaaaatccagacwtrgttatctatcaatacatggatgatttgtatgtaagctctgacttagaaatagggcagcatagaacaaaaatagaggaactaagacaacatctgttgaggtggggattaaccacaccagacaaaaaacatcagaaagaacctccattcctttggatgggttatgaactccatcctgataaatggacagtacagcctatagtgctgccagagaaagacagctggactgtcaatgacatacagaagttagtgggaaaattgaattgggcaagtcaaatttacccaggg

SEQ ID NO: 11 - DNA, 1116 bp, Human Immunodeficiency Virus (HIV)
  CDS (1)...(297): HIV Protease
  CDS (298)...(1116): Portion of HIV Reverse Transcriptase
  VARIANT 10: Xaa = Ile
  VARIANT 46: Xaa = Glu or Lys
  VARIANT 103: Xaa = Pro or Ser
  VARIANT 292: Xaa = Leu
cctcagatcactctttggcaacgacccatygttacaataaagataggggggcaactaaaaraagctctattagatacaggagcagatgatacagtattagaagaaatgaatttgccaggaagatggaaaccaaaaatgatagtgggaattggaggttttgtcaaagtaagacagtatgatcaggtacccatagagatctgtgggcataaaattataggtacagtattaataggacctacccctgccaacgtaattggaagaaatctgatgactcagcttggttgcactttaaattttcccattagtyctattgaaactgtaccagtaaaattaaagccaggaatggatggcccaaaagttaaacaatggccattgacagaagaaaaaataaaagcattagtagaaatttgtgcagaactggagaaggaagggaaaatttcaagaattgggcctgaaaatccatacaatactccaatatttgccataaagaagaaaaacagtactaggtggagaaaattagtagatttcagagaacttaataagagaactcaagacttctgggaaattcaattaggaataccacatcctgcagggttaaaaaagaacaaatcagtaacagtactggatgtgggggatgcatatttttcagttcccttagataaagacttcaggaagtacactgcatttaccatacctagtacaaacaatgagacaccagggattagatatcagtacaatgtgcttccacaaggatggaaaggatcaccagcaatattccaagatagcatgacaaaaatcttagatccctttagaaagaaaaatccagacatagttatctatcaatacgtggatgatttgtatgtaggatctgacytagaaatagagcagcatagagcaaaaatagaggaactgagagaatatctgttaaagtggggatttttcacaccagagcaaaaacatcagaaagaacctccattcctttggatgggctatgaactccatcctgataaatggacagtgcagcctatagtgctgccagaaaaggacagctggactgtcaatgacatacagaagttagtgggaaaattgaactgggcaagtcagatttacccaggg

SEQ ID NO: 12 - DNA, 1116 bp, Human Immunodeficiency Virus (HIV)
  CDS (1)...(297): HIV Protease
  CDS (298)...(1116): Portion of HIV Reverse Transcriptase
  VARIANT 294: Xaa = Ile or Thr
  VARIANT 299: Xaa = Ala or Thr
cctcaaatcactctttggcarcgacccttagtcacaataaagataggggggcaactaaaggaagccctattagatacaggagcagatgatacagtactagaagaaatgaatttgccaggaaaatggaaaccaaaaatgatagggggaattggaggttttatcaaagtaaggcagtatgatcaratacccatagagatctgcgggtataaagctgtgggtacagtattagtaggacctacacctgtcaacataattggaagaaatctgttgactcaaattggttgcactttaaattttcccattagtcctattgaaactgtaccagtaaaattaaagccaggaatggatggcccaaaagttaaacaatggccattgacagaagaaaaaataaaagcattaatagaaatttgtacagaaatggaaaaggaaggaaaaatttcaaaaattgggcctgaaaatccatacaatactccagtatttgccataaagaaaaaagacggtactaaatggagaaaattagtagatttcagagaacttaataagagaactcaagacttctgggaagttcaattaggaataccacatcccgcagggttaaaaaagaaaaaatcagtaacagtactagatgtgggtgatgcatatttttcagttcccttagatcaagacttcagaaagtatactgcattcactatacctagtataaacaatgagacaccagggattagatatcagtacaatgtgcttccacagggatggaaaggatcaccagcaatattccaaagtagcatgacaaaaatcttagagccttttagaaaacaaaatccagacatggttatctatcaatatatggatgatttgtatgtaggctctgacttagaaayagggcagcatagarcaaaaatagaggaactgagacaacatctgttgaggtggggatttaccacaccagacaaaaaacatcagaaagaacctccatttctttggatgggttatgaactccatcctgataaatggacagtacagcctataatgctgccagaaaaagacagctggactgtcaatgacatacagaagctagtgggaaaattgaattgggcaagtcagatttatgcaggg

SEQ ID NO: 13 - DNA, 1116 bp, Human Immunodeficiency Virus (HIV)
  CDS (1)...(297): HIV Protease
  CDS (298)...(1116): Portion of HIV Reverse Transcriptase
  VARIANT 10: Xaa = Ile
  VARIANT 20, 200: Xaa = Arg or Lys
  VARIANT 276: Xaa = Asp or Gly
cctcagatcactctttggcaacgacccatygtcaacataaaggtaggggggcaactaarggaagctctaatagatacaggagcagatgatacagtattagaagacatagatttgccaggaagatggagaccaagaatgatagggggaattggaggttttgtcaaagtaaagcagtatgatcagatacccatagaaatatgtggacataaagttataggtacagtattagtaggacctacgcctgccaacataattggaagaaatctgttgactcagattgggtgcactttaaattttcccattagtcctattgaaactgtaccagtaaaattaaaaccaggaatggatggcccaaaagttaaacaatggccattgacagaagaaaagataaaagcattagtagaaatttgtacagaattggaaaaggaaggaaaaatttcaaaaattgggcctgaaaatccatacaatactccagtatttgccataaagaagaaaaacagtactagatggagaaaattagtagattttagagaacttaataagagaactcaagacttttgtgaagtgcaattaggaataccgcatcccgcagggttaaraaagaaaagatcagtaacagtactggatgtgggtgatgcatatttttcagttcccttagatgaagacttcaggaagtatactgcctttaccatacctagtataaacaatgagacaccagggattagatatcagtataatgtgcttccacagggatggaaaggatcaccagcaatattccaaagtagcatgacaaaaatcctagagccttttagaaaacaaaatccagrcatagttatcgttcaatacgtggatgatttgtatgtagggtctgacttagaaatagggcaacatagagcaaaaatagaggagttgagagaacatctgttgaggtggggattyttcacaccagacgaaaaacatcagaaagaacctccatttctttggatgggttatgaactccaccctgataaatggaccgtacagcctataaatttgccagaaaaagacagctggactgtcaatgacatacagaagttagtgggaaaattgaattgggcaagtcagatttactcaggg

SEQ ID NO: 14 - DNA, 1116 bp, Human Immunodeficiency Virus (HIV)
  CDS (1)...(297): HIV Protease
  CDS (298)...(1116): Portion of HIV Reverse Transcriptase
  VARIANT 262: Xaa = Ser
  VARIANT 302, 318: Xaa = Glu or Lys
cctcaaatcactctttggcaacgacccctcgtcacaataaagataggggggcaagtaagggaagctctattagatacaggagcagatgatacagtattagaagaaatgaatttgccaggaaaatggaagccaaaaatgatagggggaattgggggctttatcaaagtaagacagtatgatcaaatacccatagaaatctgtggacataaagctatagggacagtgttaataggacctacacctgtcaacataattggaagaaatctgttgactcagcttggttgcactttaaattttcctattagtcctattgaaactgtgccagtaaaattaaagccaggaatggatggtccaaaagttaaacaatggccattgacagaagaaaaaataaaagcattgatagaaatttgtacagaaatggaaaaggaaggaaagatttcaaaaattgggcctgaaaatccatacaatactccagtatttgccataaagaaaaaaaacagtactagatggaggaaactagtagacttcagagaacttaataagagaactcaagacttttgggaagttcaattaggaataccacatcccgcaggattaaaaaagagaaaatcagtaacagtactggatgtgggtgatgcatatttttcagttcccttagataargacttcaggaaatacactgcattcaccatacctagtataaacaatgagacaccagggattagatatcagtacaatgtgctgccacaaggatggaaaggatcaccatcaatattccaaagtagyatgacaaaaatcttagagccttttagaaagcaaaatccagacatagatatctgtcaatacatggatgatttgtatgtaggatctgacttagaaatagggcagcatagagcaaaaataraggaactgagagagcatctgctaaagtggggatttaccacaccagacraaaaacatcaraaagaacctccatttctttggatgggttatgaacttcatcctgataaatggacagtacaacatatagagctaccagaaaaagacagctggactgtcaatgacatacaaaagttagtgggaaaattaaattgggcaagtcagatttatgcaggg

SEQ ID NO: 15 - DNA, 1116 bp, Human Immunodeficiency Virus (HIV)
  CDS (1)...(297): HIV Protease
  CDS (298)...(1116): Portion of HIV Reverse Transcriptase
  VARIANT 34: Xaa = Glu or Stop codon
  VARIANT 64: Xaa = Ile or Leu
  VARIANT 261: Xaa = Ser
  VARIANT 266: Xaa = Ile
  VARIANT 330: Xaa = Gly
  VARIANT 359, 363: Xaa = Leu
cctcaaatcactctttggcarcgacccctcgttgcaataaagataggggggcaactaaaggaagctctattagatacaggagcagatgatacagtattakaagaaatggatttgccaggaagatggaaaccaaaaatgatagggggaattggaggttttatcaaagtaagacagtatgatcaggtatccwtagaaatctgtggacataaagctataggtacagtattaataggacctacacctgtcaacataattggaagaaatctgttgactcagattggttgcactttaaattttcccattagtcctattgaaactgtaccagtaaaattaaagccaggaatggatggcccaaaagttaaacaatggccattgacagaagaaaaaataaaagcattagtagaaatttgtacagaaatggaaaaggaaggaaaaatttcaaaaattgggcctgaaaatccatataatactccagtatttgccataaagaaaaaagacagtactaaatggagaaaattggtagatttcagagaacttaataagaaaactcaagacttctgggargttcaattaggaataccacatcccgcagggttaaaaaagaaaaaatcagtaacagtactggatgtgggtgatgcatatttttcagttcccttagatccagacttcaggaagtatactgcatttaccatacctagtataaacaatgagacaccaggaatcagatatcagtacaatgtgcttccacagggatggaaaggatcaccagcaatatttcaaagyagcatgataagaatyttagagccttttagaaaacaaaatccagaaatagttatctatcaatacatggatgatttgtatgtaggatctgatttagaaatagaacagcatagagcaaaaatagaggaactgagacaacatctgttaaggtggggatttaccacaccagayaaaaaacatcagaaagaacctccattcctttggatgggktatgaactccatcctgataaatggacagtacagcctatagtgctgccagaaaaagacagctggactgtcaatgacatacagaagttrgtgggaaaattraattgggcaagtcagatttactcaggg

SEQ ID NO: 16 - DNA, 1116 bp, Human Immunodeficiency Virus (HIV)
  CDS (1)...(297): HIV Protease
  CDS (298)...(1116): Portion of HIV Reverse Transcriptase
  VARIANT 134: Xaa = Ile or Val
  VARIANT 299: Xaa = Ala or Thr
cctcagatcactctttggcaacgacccctcgtcacaataaagataggggggcaactaaaggaggctctattagatacaggagcagatgatacagtattagaagacatgactttgccaggaagatggaaaccaaaaatgatagggggaattggaggttttatcaaagtaagacagtatgatcagatacccatagaaatctgtggacataaagctataggtacagtattagtaggacctacacctgtcaacataattggaagaaatctgttgactcagattggttgcactttaaattttcccattagtcctattgaaactgtaccagtaaaattaaagccaggaatggatggcccaaaagttaaacaatggccattgacagaagaaaaaataaaagcattartagaaatttgtacagaaatggaaaaggaaggaaagatttcaaaaattgggcctgaaaatccatacaatactccagtatttgccataaagaaaaargatggtactaaatggagaaaattagtagatttcagagaacttaataagagaactcaagacttctgggaaattcaattaggaataccacatcctgcagggttaaaaaagaaaaagtcagtaacagtactggatgtgggtgatgcatatttttcagttcccttagatgaagacttcaggaagtatactgcatttactatacctagtataaacaatgagacaccagggattagatatcagtacaatgtgcttccacaaggatggaaaggatcaccagcaatattccaatgtagcatgacaaaaatcttagagccttttagaaagcaaaatccagacatagttatctatcaatacatggatgatttgtatgtaggatctgacttagaaatagggcagcatagarcaaaaatagaggaactgaggcaacatctgttgaagtggggatttaccacaccagacaaaaaacatcagaaagaacctccattcctttggatgggttatgaactccatccagataaatggacagtacagcctatagtgctgccacaaaaagacagctggactgtcaatgacatacagaagttagtgggaaaattgaattgggcaagtcagatttatccaggg

SEQ ID NO: 17 - DNA, 1116 bp, Human Immunodeficiency Virus (HIV)
  CDS (1)...(297): HIV Protease
  CDS (298)...(1116): Portion of HIV Reverse Transcriptase
  misc_feature 1113: n = a, c, t, or g
  VARIANT 10: Xaa = Ile
  VARIANT 62: Xaa = Ile or Val
  VARIANT 233: Xaa = Ser
  VARIANT 249: Xaa = Gln or Pro
  VARIANT 307: Xaa = His or Tyr
  VARIANT 327: Xaa = His or Leu
cctcaaatcactctttggcaacgacccatygtcacaataaaggtaggggggcaactaaaggaagccctaatagatacaggagcagatgatacagtgttagaagaaatgaatttgccaggaagatggaaaccaaaattgatagggggaattggaggttttatcaaagtaagacagtatgatcagrtacccatagaaatctgtggacataaagctgtaggttcagtgttagtaggacctacacctgccaacataattggaagaaatctgttgactcagattggttgcactctaaattttcccattagtcctattgaaactgtaccagtaaaattaaagccaggaatggatggcccaaaagttaaacaatggccattgacaaaagaaaaaatagaagcattagtagaaatctgtgcagaactggaagaggcagggaaaatttcaaaaattgggcctgaaaatccatacaatactccagtatttgccataaagaaraagaacagtactaaatggagaaaattagtagatttcagagaacttaacaagagaactcaagacttctgggaagttcaattaggaataccacatcccgcagggttaaaaaagaaaaaatcagtaacagtactggatgtgggtgatgcatatttctcaattcccttagataaggacttcaggaagtatactgcatttacaatacctagyataaacaatgagacaccagggattagatatcagtacaatgtgcttcmacagggatggaaaggatcaccagcaatattccagtgtagcatgacaaaaatcttagatccttttagaaaacaaaatccagacatagttatctatcaatacgtggatgatttgtatgtaggatctgacttagaaatagggcarcatagaacaaaaatagaggaactgagacaayatctgtggaagtggggattttacacaccagagaataaacatcagaaagaacctccattccwttggatgggttatgaactccatcctgataaatggacagtacagcctatagtgctgccagaaaaggacagctggactgtcaatgacatacagaaattagtgggaaaattgaattgggcaagtcagatttatgcnggg

SEQ ID NO: 18 - DNA, 1117 bp, Human Immunodeficiency Virus (HIV)
  CDS (1)...(297): HIV Protease
  CDS (298)...(1117): Portion of HIV Reverse Transcriptase
  VARIANT 58: Xaa = Glu
  VARIANT 196: Xaa = Pro
  VARIANT 242: Xaa = Arg
  VARIANT 301, 340: Xaa = Val
  VARIANT 313: Xaa = Leu
  VARIANT 330: Xaa = Gly
cctcaaatcactctttggcaacgacccctcgtcacaataaagataggggggcarctaaaggaagctctattagatacaggagcagatgatacagtagtagaagaaatgaatttatcaggaaggtggaaaccaaaaatgatagggggaattggaggttttatcaaagtaagasaatatgaacagatacctgtagaaatttgtggacataaagctgtaggtacagtattagtgggacctacacctgtcaacataattggaagaaatctgttgactcagattggttgcactttaaattttcccattagtcccattgaaactgtaccagtaaaattgaagccaggaatggatggcccgagagttaaacaatggccattgacagaagaaaaaataaaagcattagtagaaatttgtacagaaatggaaaaggaagggaaaatttcaaaaattgggcctgaaaatccatacaatactccagtatttgccataaagaaaaaagacagtaataaatggaggaaattagtggatttcagagaacttaataagagaactcaagacttctgggaagttcaattagggataccacatccytcagggttaaaaaagaaaaaatcagtaacagtactggatgtgggtgatgcatacttttcagttcccttagataaagaattcaggaagtatactgcatttaccatacctagtacaaacaatgagacaccagggattagrtatcagtacaatgtgctgccacagggatggaaaggatcaccagcaatattccaaagtagcatgacaaaaatcttagagccttttagagaacaaaatacagacatagttatctgtcaatacatggatgatttgtatgtaggatctgacttagaaatagggcagcatagagcaaaagtrgaggaactgagacaacatctgttgaggtggggaytaaccacaccagacaaaaaacatcagaaagaacctccattccgttggatgggktatgaactccatcctgataaatggacagtrcaacctatagagctgccagaaaaagacagctggactgtcaatgacatacaaaaagttagtgggaaaattaaattgggcaagtcagatttacccaggg

SEQ ID NO: 19 - DNA, 1116 bp, Human Immunodeficiency Virus (HIV)
  CDS (1)...(297): HIV Protease
  CDS (298)...(1116): Portion of HIV Reverse Transcriptase
  VARIANT 10, 23, 38, 173: Xaa = Leu
cctcagatcactctttggcaacgacccctygtcacagtaaagataggggggcaactaacggaagctytattggatacaggagcagataatacagtattagaagaaatgagtttrccaggaagatggaaaccaaaaatgatagggggaattggaggttttatcaaagtaagacagtatgatcagatacccatagaaatctgtggacataaagtagtaggtacagtattaataggacctacacctgtcaacataattggaagagatctgttgactcagattggttgcactttaaattttcccattagtcctattgaaactgtaccagtgaaattaaagccaggaatggatggcccaaaagttaaacaatggccattgacagaagaaaaaataaaagcattagtagaaatttgtacagaactggaaaaggaagggaaaatttcaaaaattgggcctgaaaatccatacaatactccagtatttgccataaagaaaaargacagtactaaatggagaaaattrgtagatttcagagaacttaataaaagaactcaagacttctgggaagttcaattaggaataccacatccctcagggttaaaaaagaaaaaatcagtaacagtactagacgtgggtgatgcatatttctcagttcccctagataaagaattcaggaagtatactgcattcaccatacctagtgtaaacaatgagactccagggattagatatcagtacaatgtgctgccacagggatggaaaggatcaccagcaatattccaaagtagcatgacaaaaatcttagagccttttagaaaacacaatccaaacatagttatctatcaatacgtggatgatttatatgtaggatctgacttagaaatagggcagcatagaacaaaagtagaggaactgagacaacatctgttgaagtgggggttttacacaccagacaaaaaacatcagaaagaacccccattcctttggatgggttatgaactccatcctgataaatggacagtgcagcctatagtgctgccagaaaaagacagctggactgtcaatgacatacaaaagttagtgggaaaattgaattgggcaagtcagatttacccaggg

SEQ ID NO: 20 - DNA, 1117 bp, Human Immunodeficiency Virus (HIV)
  CDS (1)...(297): HIV Protease
  CDS (298)...(1117): Portion of HIV Reverse Transcriptase
cctcagatcactctttggcaacgacccctcgtcacaataaagataggagggcagctaaaggaagctctattagatacaggagcagatgatacagtattagaagacataaatttgccagggaaatggaaaccaaaaatgatagggggaattggaggttttatcaaagtaagacagtatgatcaaataccagtagaaatttgtggacataaagctgtaggtacagtattaataggacctacacctgtcaacgtaattggaagaaatctgatgactcagattggctgcactttaaattttcccattagtcctattgaaactgtaccagtaaaattaaagccaggaatggatggtccaaaagttaaacaatggccattaacagaagaaaaaataaaagcattagtagaaatttgcacagaattggaaaaggaagggaaaatttcaaaaattggacctgaaaatccatacaatactccagtatttgccataaagaaaaaagacagtactaaatggagaaaattagtagatttcagagaacttaataagagaactcaagacttctgggaagttcaattaggaataccacatcctgcagggttaaaaaagaaaaaatcagtaacagtactggatgtgggtgatgcatatttttcaatacccttagatgaagaattcaggaagtatactgcatttaccatacctagtccaaacaatgagacaccagggattagatatcaatacaatgtgcttccacagggatggaaaggatcaccagcaatatttcaatgtagtatgacaaaaatcttagagccttttagaaaagaaaatccagatatagttatctaccaatacatggatgacttatatgtaggatctgatttagaaatagggcagcatagaacaaaaatagaggaactgagacaatatctgtggaagtggggattttacacaccagacaaaaaacatcagcaagaacctccattccgttggatgggttatgaactccatcctgataaatggacagtacagcctatagtgctgccagaaaaagacagctggactgtcaatgacatacagaagtttagtgggaaaattgaattgggcaagtcagatttatgcaggg

SEQ ID NO: 21 - DNA, 1116 bp, Human Immunodeficiency Virus (HIV)
  CDS (1)...(297): HIV Protease
  CDS (298)...(1116): Portion of HIV Reverse Transcriptase
  VARIANT 9: Xaa = Pro or Thr
  VARIANT 12: Xaa = Ser or Thr
cctcagatcactctttggcaacgamccgttgtcwcaataaagataggggggcaactaaaagaagctctattagayacaggggcagatgatacagtattagaagacatgcatttgccaggtagatggaaaccaaaaatgatagtgggaattgggggttttgtcaaagtaagacagtatgatcagatacctgtagaaatctgtggacataaagctataggtacagtattagtaggacctacaccagccaacataattggaagaaatctgttgactcagattggttgcactttaaatttccccatcagtcctattgaaactgtaccagtaaaattaaagccaggaatggatggcccaaaaattagacaatggccattaacagaagaaaaaataaaagcattagtagaaatctgtacagaaatggaaaaggaagggaaaatttcaaaaattgggcctgaaaatccatacaatactccagtatttgccataaagaaaaaaaatagtactaaatggagaaaattagtagatttcagagaacttaataagagaactcaagacttctgggaagttcaattaggaataccacatcccgcagggttaaaaaagaaaaaatcagtaacagtactagatgtgggtgatgcatatttttcagttcccttagataaagacttcaggaagtatactgcatttaccatacctagtatgaacaatgagacaccaggaattagatatcagtacaatgtgcttccaatgggatggaaaggatcaccagcaatattccaaagtagtatgacaaaaatcttagagccttttagaaaacagaatccagacatagtcatctatcaatacatggatgatttatatgtaggatcggacttagaaatagggcagcatagaacaaaaatagaggaattgagacaacatctgttgagatggggatttaccacaccagacaaaaaacatcagaaagaacctccattcctttggatgggttatgaactccatcctgataaatggacagtgcagcctatagtgctgccagaaaaggacagctggactgttaatgacatacagaagttagtgggaaaattaaattgggcaagtcaaatttatgcaggg

SEQ ID NO: 22 - DNA, 1116 bp, Human Immunodeficiency Virus (HIV)
  CDS (1)...(297): HIV Protease
  CDS (298)...(1116): Portion of HIV Reverse Transcriptase
  VARIANT 41: Xaa = Arg
  VARIANT 340: Xaa = Val
cctcagatcactctttggcaacgacccctcgtcacaataaaggtaggagggcaactaaaggaggctctattagatacaggagcagatgatacagtattagaagacatagatttgccaggaagrtggaaaccaaaaatgatagggggaattggaggttttatcaaagtaagacagtatgatcagatacccatagaaatatgtggacataaagctataggtacagtattagtaggacctacacctgtcaacataattggaagaaatctgttgactcggattggttgcactttaaattttcccattagtcctattgaaactgtaccagtaaaattaaagccaggaatggatggcccaaaagttaaacaatggccattgacagaagaaaaaataaaagcattagtagaaatttgtacagaaatggaaaaggaaggaaaaatttcaaaaattgggcctgaaaatccatacaatactccagtatttgccataaagaaaaaagacagtactaaatggagaaaattagtagattttagagaacttaataagagaactcaagatttctgggaagtgcaattaggaataccgcatcccgcagggttaaaaaagaaaaaatcagtaacagtactggatgtgggtgatgcatatttttcagttcccttagataargayttcaggaagtatactgcctttaccatacctagtataaacaatgagacaccagggattagatatcagtataatgtgcttccacagggatggaaaggatcaccagcaatattccaaagtagcatgacaaaaatcctagagccttttagaaaacaaaatccagacatggttatctatcaatacatggatgatttgtatgtagggtctgacttagaaatagggcagcatagaacaaaaatagaggaactgagagaacatctgttgaggtggggatttaccaccccagacaaaaaacatcagaaagagcctccattcctttggatgggttatgaactccatcctgataaatggaccgtrcagcctatagagctgccagaaaaagacagctggactgtcaatgacatacagaagttagtgggaaaattgaattgggcaagtcagatttacccaggg

SEQ ID NO: 23 - DNA, 1116 bp, Human Immunodeficiency Virus (HIV)
  CDS (1)...(297): HIV Protease
  CDS (298)...(1116): Portion of HIV Reverse Transcriptase
  VARIANT 138: Xaa = Ser or Thr
  VARIANT 161: Xaa = Ala
  VARIANT 302: Xaa = Asn or Lys
  VARIANT 306: Xaa = Gln or Glu
  VARIANT 352: Xaa = Thr
  VARIANT 353, 360: Xaa = Val
cctcagatcactctttggcaacgacccatagtcacaataaagataggggggcaactaaaggaagctctaatagatacaggagcagatgatacagtattagaagacataaatttgccaggaagatggaaaccaaaattaatagggggaattggaggttttgtcagagtgaaacagtatgatcagatacccatagaaatttgtggacataaagttataggtacagtattagtaggacctacacctgccaacataattggaagaaatctgttgactcagattggttgcactttaaattttcccattagtcctattgaaactgtaccagtaaaattaaagccaggaatggatggcccaagagttaaacaatggccattgacagaagaaaaaataaaagcattaacagaaatctgtwcagagatggaaaaggaagggaaaatttcaaaaattgggcctgaaaatccatacaacactccagtatttgcyatacacaagaaaaatagtaatagatggagaaaagtagtagatttcagggaacttaataagagaactcaagacttctgggaagttcaattaggaataccacatcccgcaggattaaaaaagaacaaatcagtaacagtactggatgtgggtgatgcatatttttcagttcccttagataaggatttcaggaagtatactgcgtttaccatacctagtataaacaatgagacaccagggatcagataccagtacaatgtgcttccacaaggatggaaaggatcaccagcaatattccaaagtagcatgacaagaatcttagagccttttagaaaacaaaatccagaaatagttatctgtcaatacatggatgatttgtatgtaggatctgacttagaaatagggcagcatagaacaaaaataaakgaactgagasaacatctgttgaggtggggatttttcacaccagaccaaaaacatcagaaagaacctccattcctttggatgggttatgaactccatcctgataaatggacagtacagcctatagtgctgccagaaaargacagttggacwgtyaatgacatacagaaattagtkggaaaattgaattgggcaagtcaaatttacccaggg

SEQ ID NO: 24 - DNA, 1116 bp, Human Immunodeficiency Virus (HIV); identical to SEQ ID NO: 23
  CDS (1)...(297): HIV Protease
  CDS (298)...(1116): Portion of HIV Reverse Transcriptase
  VARIANT 138: Xaa = Ser or Thr
  VARIANT 161: Xaa = Ala
  VARIANT 302: Xaa = Asn or Lys
  VARIANT 306: Xaa = Gln or Glu
  VARIANT 352: Xaa = Thr
  VARIANT 353, 360: Xaa = Val

SEQ ID NO: 25 - DNA, 1116 bp, Human Immunodeficiency Virus (HIV)
  CDS (1)...(297): HIV Protease
  CDS (298)...(1116): Portion of HIV Reverse Transcriptase
  VARIANT 89: Xaa = Leu
  VARIANT 189: Xaa = Ile or Val
cctcaaatcactctttggcaacgacccctcgtcacaataaaaataggggggcaactaaaggaagctctactagatacaggagcagatgatacagtattagaagaaatgagtttgccaggaaaatggaaaccaaaaatgatagggggaattggaggttttatcaaagtaagacagtatgatcaggtatccatggaaatctgtggacataaagttataggtacagtattagtaggatctacacctgtcaacataattggaagaaatytgttgactcagcttgggtgcactttaaattttcccattagtcctattgaaactgtaccagtaaaattaaagccaggaatggatggcccaaaagttaaacaatggccattgacagaagaaaaaataaaagcattaatagaaatttgtacagaaatggaaaaggargggaaaatttcaaaaattgggcctgaaaatccatacaatactccagtatttgccataaagaaaaaagacagtactaaatggagaaagttagtagatttcagagaacttaataagaaaactcaagatttctgggaarttcaattaggaataccacatcccgcagggttacaaaagaacaaatcagtaacagtactggatgtgggtgatgcatatttttcagtccccttagataaagacttcaggaagtatactgcatttaccatacctagtacaaacaatgagacaccagggattagatatcagtacaatgtgcttccacagggatggaaaggatcaccagcaatattccaatatagcatgacaaaaatcttagagccttttagaaaacaaaatccagacatagttatctaccaatacgtggatgatttgtatgtaggatctgacttagaaatagaacagcatagaacaaaaatagaggaactgagacagcatctgttgaggtggggatttaccacaccagacaaaaaacatcagaaagaacctccattcctctggatgggttatgaactccatcctgataaatggacagttcagcctatagtgctgccagaaaaggacagctggactgtcaatgacatacagaagttagtgggaaaattaaattgggcaagtcagatttacccaggg

SEQ ID NO: 26 - DNA, 1116 bp, Human Immunodeficiency Virus (HIV)
  CDS (1)...(297): HIV Protease
  CDS (298)...(1116): Portion of HIV Reverse Transcriptase
  misc_feature 496, 497, 498: n = a, t, c or g
  VARIANT 140: Xaa = Leu
  VARIANT 166: Xaa = Any Amino Acid
  VARIANT 310: Xaa = Arg or Lys
  VARIANT 325: Xaa = Pro
  VARIANT 327, 341: Xaa = Gln or His
cctcagatcactctttggcaacgacccatcgtcgaaataaaggtaggggggcaactaatagaagctctattagatacaggagcagatgatacagtattagaagaaataaatttaccaggaagatggaaaccaagaatgatagggggaattggaggttttgtcaaagtaagacagtatgatcaggtacctatcgaaatctgtggacataaagttataagtacagtattagtaggacctacacctgccaacataattggaagaaatctgatgactcagattggttgcactttaaattttcctattagtcctattgaaactgtaccagtaaaattaaaaccaggaatggatggcccaagagttaaacaatggccattgacagaagaaaaaataaaagcattagtagaaatttgtacagaaytggaagaggaagggaaaatttcaaaaattgggcctgaaaatccatacaatactccaatatttgccataaagaagaaannnagtggtagatggagaaaaatagtagattttagagaacttaataagagaactcaagatttctgggaagttcaattaggaataccacatcccgcagggttaaaaaagaacaagtcagtaacaattctggatgtgggtgatgcatatttttcagttcccttagataaggaattcaggaagtatactgcatttaccatacctagtataaataatgagacaccagggattagatatcagtacaatgtgcttccacagggatggaaaggatcaccagcaatattccaaagtagcatgacaaaaatcttagagccttttagaaaacaaaatccagacatagttatctatcagtacgtggatgatttgtatgtaggatctgatttagaaataggggagcatagaacaaaaatagaggaactgagacarcatctgttaargtggggatttttcacaccagaacaaaaacatcagaaagaacctccmttccaktggatgggttatgaactccaycctgataaatggacagtacascctatagtgctgccagaaaaagatagctggactgtcaatgacatacagaagttagtgggaaaattgaattgggcaagtcagatttacccaggg

SEQ ID NO: 27 - DNA, 1113 bp, Human Immunodeficiency Virus (HIV)
  CDS (1)...(297): HIV Protease
  CDS (298)...(1116): Portion of HIV Reverse Transcriptase
  VARIANT 140: Xaa = Leu
  VARIANT 309: Xaa = Arg or Lys
  VARIANT 324: Xaa = Pro
  VARIANT 326, 340: Xaa = Gln or His
cctcagatcactctttggcaacgacccatcgtcgaaataaaggtaggggggcaactaatagaagctctattagatacaggagcagatgatacagtattagaagaaataaatttaccaggaagatggaaaccaagaatgatagggggaattggaggttttgtcaaagtaagacagtatgatcaggtacctatcgaaatctgtggacataaagttataagtacagtattagtaggacctacacctgccaacataattggaagaaatctgatgactcagattggttgcactttaaattttcctattagtcctattgaaactgtaccagtaaaattaaaaccaggaatggatggcccaagagttaaacaatggccattgacagaagaaaaaataaaagcattagtagaaatttgtacagaaytggaagaggaagggaaaatttcaaaaattgggcctgaaaatccatacaatactccaatatttgccataaagaagaaaagtggtagatggagaaaaatagtagattttagagaacttaataagagaactcaagatttctgggaagttcaattaggaataccacatcccgcagggttaaaaaagaacaagtcagtaacaattctggatgtgggtgatgcatatttttcagttcccttagataaggaattcaggaagtatactgcatttaccatacctagtataaataatgagacaccagggattagatatcagtacaatgtgcttccacagggatggaaaggatcaccagcaatattccaaagtagcatgacaaaaatcttagagccttttagaaaacaaaatccagacatagttatctatcagtacgtggatgatttgtatgtaggatctgatttagaaataggggagcatagaacaaaaatagaggaactgagacarcatctgttaargtggggatttttcacaccagaacaaaaacatcagaaagaacctccmttccaktggatgggttatgaactccaycctgataaatggacagtacascctatagtgctgccagaaaaagatagctggactgtcaatgacatacagaagttagtgggaaaattgaattgggcaagtcagatttacccaggg

SEQ ID NO: 28 - DNA, 1116 bp, Human Immunodeficiency Virus (HIV)
  CDS (1)...(297): HIV Protease
  CDS (298)...(1116): Portion of HIV Reverse Transcriptase
  VARIANT 5: Xaa = Leu or Val
  VARIANT 10: Xaa = Ile
  VARIANT 104: Xaa = Ile or Met
  VARIANT 143: Xaa = Ala or Glu
  VARIANT 340: Xaa = Gly or Val
cctcaaatcactstttggcaacgacccatygtctcaataaagataggggggcaaataaaggaagctctattagatacaggagcagatgatacagtattagaagaaatgaatttgccaggaagatggaagccaaaaatgatagtgggaattggaggttttagcaaagtaagacaatatgatcagatacccatagaaatctgcggacgtaaagttgtaggttcagtattaataggacctacacctgccaacataattggaagaaatctgttgactcagcttggctgtactttaaattttcccattagtcctatkgaaactgtaccagtaaaattaaagccaggaatggatggcccaaaagttaaacaatggccattgacaaaagagaaaataaaagcattaatagaaatttgtacagaattggaagaagmaggaaaaattacaaaaattgggcctgaaaatccgtacaatactccaatatttgccataaagaaaaaraacagtactaaatggagaaaattagtagacttcagggaacttaataagagaactcaagacttctgggaagttcaattaggaataccacatcctgcagggttaaaaaagaaaaaatcagtaacagtactggatgtgggtgatgcatatttttcaattcccttagataaagacttcaggaartatactgcatttaccatacctagtacgaataatgagacaccagggattagatatcagtataatgtgcttccacagggatggaaaggatcaccagcaatattccaaagtagcatgacaaaaatcttagagccttttagaaaacaaaatccagacatagttatctatcaatacgtggatgatttgcttgtaggatctgacttagaaatagagcagcatagaacaaaaatagaggagctaagacaacatctgtggaagtggggattttacacaccagacaaaaaacatcagaaagaacccccattcctttggatgggttatgaactccatcctgataaatggacagkacagcctatagtgctgccagaaaaagacagctggactgtcaatgacatacaaaagttagtgggaaaattaaattgggcaagtcagatttatccaggg

SEQ ID NO: 29 - DNA, 1116 bp, Human Immunodeficiency Virus (HIV)
  CDS (1)...(297): HIV Protease
  CDS (298)...(1116): Portion of HIV Reverse Transcriptase
  misc_feature 1113: n = a, c, t, or g
  VARIANT 75, 247: Xaa = Val
  VARIANT 230: Xaa = Thr
  VARIANT 241: Xaa = Stop codon
  VARIANT 256: Xaa = Gln or Pro
  VARIANT 260: Xaa = Gln or Lys
cctcagatcactctttggcaacgacccatcgtcacaataaagataggggggcaactaaaggaagctctaatagatacaggagcagatgatacagtattagaagaaatgaatttgccaggaagatggaaaccaaaaataatagggggaattggaggtcttgtcaaagtaagacagtatgatcagatacccatagaaatctgtggacataaagttataggtacagtwttagtaggacctacacctgccaacataattggaagaaatctgttgactcagcttggttgcactttaaattttcccattagtcctattgaaactgtaccagtaaaattaaagccagggatggatggcccaaaagttaaacaatggccattgacagaagaaaaaataaaagcattagtagaaatttgtacagaaatggagaaggagggaaagatttcaaaaattgggcctgaaaatccatacaatactccagtatttgccataaagaaaaagaacagtactaggtggagaaaattagtagatttcagagaacttaataagagaactcaagacttctgggaagttcaattaggaataccacatcccgcagggttaaaaaagaacaaatcagcaacagtactggatgtgggcgatgcatatttttcagttcccttagacaaagaattcaggaagtatactgcatttacyatacctagtataaacaatgaaacaccagggtaratatcagtgtacaatgtrcttccacaaggatggaaaggatcacmagcaatattcmaaagtagcatgacaagaatcttagagccttttagaaaacaaaatccagaaatagttatctatcaatacgtggatgatttgtatgtaggatctgacttagaaatagggcagcatagaacaaaagtagaggaactgagacaacatctgttgaggtggggatttttcacaccagaccaaaaacatcagaaagaacccccattcctttggatgggttatgaactccatcctgataaatggacagtacagcctatagtgctgccagaaaaagacagctggactgtcaatgacatacagaagttagtgggaaaattaaattgggcaagtcagatttacgcnggg

SEQ ID NO: 30 - DNA, 1116 bp, Human Immunodeficiency Virus (HIV)
  CDS (1)...(297): HIV Protease
  CDS (298)...(1116): Portion of HIV Reverse Transcriptase
  VARIANT 10, 23: Xaa = Leu
  VARIANT 52: Xaa = Gly
  VARIANT 57: Xaa = Arg or Ser
  VARIANT 66: Xaa = Ile
  VARIANT 75: Xaa = Val
  VARIANT 144: Xaa = Gly
cctcaaatcactctttggcaacgacccctygtcacaataaagataggggggcaactaaaggaagctytattagatacaggagcagatgatacagtattagaagaaatgagcttaccaggaagatggaaaccaaaaatgatagggggaattggaggktttatcaaagtgagmcagtatgatcagatactcatagaaatytgtggacataaagctataggtacagtrttaataggacctacacctgtcaacataattggaagaaatctgttgactcagattggttgcactttaaattttcccattagtcctattgaaactgtaccagtaaaattgaaaccaggaatggatggcccaaaagtcaaacaatggccattgacagaagaaaaaataaaagcattagtagaaatttgtacagaaatggaaaaggaaggraaaattacaaaaattgggcctgaaaatccatacaatactccagtatttgccataaagaagaaaaacagtgataaatggagaaaattagtagatttcagagaacttaataagagaactcaagacttctgggaagttcaattaggaataccacatccagcagggttaaaacagaaaaagtcagtaacagtactggatgtgggtgatgcatatttttcagtacccttagatgaagacttcaggaagtatactgcatttaccatacctagtgtaaacaatgagacaccaggggttagatatcagtacaatgtactcccacagggatggaaaggatcaccagcaatatttcaaagtagcatgacaaaaatcttagagccttttaggaaacaaaatccagaaatagttatctatcaatacgtggatgatttgtatgtaggatctgacttagaaatagggcagcatagagcaaaaatagaggaactgagacaacatctgttgaggtggggattctacacaccagacaaaaaacatcagaaagaacctccattcctttggatgggttatgaactccatcctgataaatggacagtacagcctatagtgctgccagaaaaagacagctggactgtcaatgacatacagaagttagtagggaaattaaattgggcaagtcagatttatgcagga

SEQ ID NO: 31 - DNA, 1117 bp, Human Immunodeficiency Virus (HIV)
  CDS (1)...(297): HIV Protease
  CDS (298)...(1116): Portion of HIV Reverse Transcriptase
  misc_feature 1067: n = a, c, t or g
  VARIANT 90: Xaa = Leu or Met
  VARIANT 161: Xaa = Ala or Val
  VARIANT 208: Xaa = Leu
  VARIANT 290: Xaa = Ser
  VARIANT 298: Xaa = Arg
  VARIANT 299: Xaa = Ala or Thr
  VARIANT 356: Xaa = Asp, Ile, Ser or Thr
cctcagatcactctttggcaacgacccctcgtcacaataaagataggggggcaattaaaggaagctctattagatacaggagcagatgatacagtactagaagacgtgcatttgccaggaaaatggaaaccaaaaatgatagggggaattggaggttttatcaaagtaagacagtatgatgaggtacccatagaactctgtggacataaagctataggtacagtattagtaggacctacacccgtcaacataattggaagaaatctgwtgactcaacttgggtgcactctaaattttcccattagtcctattgaaactgtaccagtaaaattaaagccaggaatggatggcccaaaagttaaacaatggccattgacagaagaaaaaataaaagcattagtagaaatttgtacagaaatggaaaaggaagggaaaatttcaagagttgggcctgaaaatccatacaatactccagtatttgycataaagaaaaaagacagtactaaatggagaaaattagtagatttcagagaacttaataagagaactcaagacttctgggaagttcaattaggaataccacaycccgcagggttaaaaaagaaaaaatcagtaacagtactrgatgtgggtgatgcatatttttcagttcccttagataaagaattcagaaagtatactgcatttaccatacctagtataaacaatgagacaccagggattagataccagtacaatgtgcttccacaaggatggaaaggatcaccagcaatattccaaagtagcatgacaaaaatcttagatccttttaggaaacaaaacccagacatagttatctatcaatacgtggatgatttgtatgtaggatcygacttagaaataggacagcatagrrcaaaaatagaagaactgagacaacatctgttgaagtggggatttaccacaccagacaagaaacatcaraaagaacctccatttctttggatgggttatgaactccatcctgataaatggacagtgcagcctatagtgctgccagaaaaggacagctggactgtcaatgacantacagaagttagtgggaaaattgaattgggcaagtcagatttatgcaggg

SEQ ID NO: 32 - DNA, 1116 bp, Human Immunodeficiency Virus (HIV)
  CDS (1)...(297): HIV Protease
  CDS (298)...(1116): Portion of HIV Reverse Transcriptase
  VARIANT 10: Xaa = Leu
  VARIANT 57: Xaa = Asn or Lys
  VARIANT 231: Xaa = Ile or Thr
  VARIANT 233: Xaa = Arg or Gly
  VARIANT 277: Xaa = Ile or Leu
  VARIANT 279: Xaa = Ile or Phe
  VARIANT 282: Xaa = Phe or Tyr
cctcaaatcactctttggcaacgacccctygtcgcaataaggataggggggcaactaaaggaagccctattagatacaggagcagatgatacagtattagaagacatggagttgccaggaagatggaagccaaaaatgatagggggaattggaggttttatcaaagtaaamcagtatgatcagatacttgtagaaatctgtggacataaagctgtaggtacagtattaataggacctacacctgtcaacataattggaagaaatttgttgactcagattggctgcactttaaattttcccattagtcctattgaaactgtaccagtaaaattaaagccaggaatggatggcccaaaagttaaacaatggccattgacagaagagaaaataaaagcattagtagaaatctgtacagaattggaaaaggaaggaaaaatttcaaaaattgggcctgaaaatccatacaatactccagtatttgctataaagaaaaaagacagtactaaatggagaaaattagtagatttcagagaacttaataaaagaactcaagacttttgggaagttcaattaggaataccacatcccgcagggttaaaaaagaaaaaatccgtgacagtactggatgtgggtgatgcatatttttcagttcccttagataaagactttagaaagtatactgcatttaccayacctsgtataaacaatgagacaccagggattagatatcagtacaatgtgcttccacagggatggaaaggatccccagcaatatttcaaagcagcatgacaaaaatcttagagccttttagaaaacaaaatccagacwtagttwtctatcaatwcatagatgatctgtatgtaggctctgacttagaaatagggcagcatagaacaaaaatagaggaactgagacagcatctgtggaagtgggggttttacacaccagacaaaaaacatcagaaagaacctccatttctttggatgggttatgaactccatcctgataaatggacagtacagcctataatgctgccagaaaaagacagctggactgtcaatgacatacagaarttagtgggaaaattgaattgggcaagtcagatttacccaggg

SEQ ID NO: 33 - DNA, 1116 bp, Human Immunodeficiency Virus (HIV)
  CDS (1)...(297): HIV Protease
  CDS (298)...(1116): Portion of HIV Reverse Transcriptase
  VARIANT 25: Xaa = Asp or Tyr
  VARIANT 32: Xaa = Val
  VARIANT 133: Xaa = Leu or Phe
  VARIANT 183: Xaa = Thr
cctcagatcactctttggcaacgacccctcgtcacaataaagataggggggcaactaaaggaagctctattakatacaggagcagatgatacagtmttagaagacatgactttgccaggaagatggaaaccaaaaatgatagggggaattggaggttttatcaaagtaaaacagtatgaggagatacccatagaaatctgtggacataaagctataggtacagtattagtaggacctacacctgtcaacataattggaagaaatttgttgactcagattggttgcactttaaattttcccattagtcctattgaaactgtaccagtaaaattaaaaccaggaatggatggcccaaaagttaaacaatggccattgacagaagaaaaaataaaagcattwgtagaaatttgtgcagaactggaaaaggaagggaaaatttcaaaaattgggcctgaaaatccatacaatactccagtatttgccataaagaaaaaagacggtactaaatggagaaaggtaacagattttagagaacttaataagaggachcaagacttctgggaagttcaattaggaataccacatccctcagggttaaaaaagaaaaaatcagtaacagtactggatgtgggtgatgcatatttttcagttcccttagataaagacttcaggaagtatactgcatttaccatacctagtataaacaatgcgacaccagggattagatatcagtacaatgtgcttccacagggatggaaaggatcaccagcaatattccaaagtagcatgacaaaaatcttagagccttttagaaaacaaaatccagacatggttatctatcaatacatggatgatttgtatgtaggatctgatttagaaatagggcagcatagaacaaaaatagaggaactgagacaacatctgttgaagtggggttttaccacaccagacaaaaaacatcagaaagaacctccatttctttggatgggttatgaactccatcctgataaatggacagtacagcctatagtgctgccagaaaaagacagctggactgtcaatgacatacagaagttagtgggaaaattgaattgggcaagtcagatttattcaggg

SEQ ID NO: 34 - DNA, 1119 bp, Human Immunodeficiency Virus (HIV)
  CDS (1)...(297): HIV Protease
  CDS (298)...(1119): Portion of HIV Reverse Transcriptase
  VARIANT 24: Xaa = Leu
  VARIANT 65: Xaa = Asp or Glu
  VARIANT 361: Xaa = Gly
  VARIANT 371: Xaa = Asn or Thr
cctcagatcactctttggcaacgacccatcgtcacaataaagataggggggcagctaaaggaagctctattrgacacaggagcagatgatacagtattagaagaaatgaatttgccaggaagatggaaaccaaaaataatagggggaattggaggttttattaaagtaaaacagtatgaacagataaccatagamatctgtggacataaagctacaggtacagtattagtaggacctacacctgtcaacgtaattggaagaaatatgatgactcagattggttgcactttaaattttcccattagtcctattgaaactgtaccagtaaaattaaagccaggaatggatggcccaagagttaaacaatggccattgacagaagaaaaaataaaagcattagtagaaatttgtacagaattggaaaaggaagggaaaatttcaaaaattgggcctgaaaatccatacaatactccagtatttgccataaagaaaaaagacagtactaaatggagaaaattagtagatttcagagaacttaacaagagaactcaagacttctgggaagttcaattaggaataccacatcccgcagggttaccaaagaacaaatcagtaacggtactggatgtgggtgatgcatatttttcagttcctttagatgaagacttcaggaagtacactgcatttaccatacctaggtataacaatgagacaccagggactagatatcagtacaatgtgcttcctatgggatggaaaggatcaccagcaatattccaaagtagcatgacaaaaatcttagagccttttagaagacaaaatccagacatagttatctatcaatacgtggatgacttgtatgtaggatctgacttagagatagggcagcatagagcgaaaatagaggaactgagagaacatctgtggaagtggggtttttacacaccagacaaaaaacatcagaaagaacctccattccattggatgggttatgaactccatcctgataaatggacagtacagcctatagtgctgccagaaaaggacagctggactgtcaatgacatacagaaattagtgggraaaattgaatttgggcgagtcagatttamccaaggg

SEQ ID NO: 35 - DNA, 1115 bp, Human Immunodeficiency Virus (HIV)
  CDS (1)...(297): HIV Protease
  CDS (298)...(1115): Portion of HIV Reverse Transcriptase
  misc_feature 1112: n = a, c, t or g
  VARIANT 10: Xaa = Leu
  VARIANT 14: Xaa = Arg or Lys
  VARIANT 310: Xaa = Gln or Lys
  VARIANT 344: Xaa = Glu or Stop codon
  VARIANT 371: Xaa = Arg, Gln, Leu or Pro
cctcagatcactctttggcaacgacccctygtcccaataargataggggggcaattaaaggaagctctactagatacaggagcagatgatacagtattagaagacatgaatttaccaggaagatggaaaccaaaaatgatagggggaattggaggttttatcaargtaaaacagtatgatcagatacccatagaaatctgtgggcataaagctataggtacagtattagtaggacctacacctgtcaacataattggaagaaatctgttgactcagcttggttgcactctaaattttcccattagtcctattgaaactgtaccagtaaaattaaagccaggaatggatggcccaaaagttaaacaatggccattgacagaagaaaaaataaaagcattagtagaaatttgtacagaaatggaaaaggaaggaaaaatttcaaaaattggacctgaaaatccatacaatactccagtatttgccataaagaaaaaggacagtactaaatggagaaaattagtagatttcagagaacttaataagagaactcaagacttttgggaagtccaattaggaataccacatcccgcagggttaaaaaagaaaaaatcagtaacagtattagatgtgggagatgcatatttttcagttcccttagataaagacttcaggaagtatactgcatttaccatacctagtataaacaatgagacaccagggattagatatcagtacaatgtgcttccacagggatggaaaggatcaccagcaatattccaaagtagcatgacaaaaatcttagagccttttagaaagcaaaatccagacatagtcatatatcaatacatggatgatttgtatgtagggtctgacttagaaataggacagcatagaacaaaaatagaggaactgagacaacacttgttgmaatggggattcaccacaccagacaaaaagcatcagaaagaacccccattcctttggatgggttatgaactccatcctgataaatggacagtacagcctatakaactgccagaaaaagacagctggctgtcaatgacatacagaaattagtgggaaagttgaattgggcaagtcaaatttatgcnggg

SEQ ID NO: 36 - DNA, 1116 bp, Human Immunodeficiency Virus (HIV)
  CDS (1)...(297): HIV Protease
  CDS (298)...(1116): Portion of HIV Reverse Transcriptase
  VARIANT 54: Xaa = Ile or Val
  VARIANT 82: Xaa = Ala or Val
  VARIANT 151: Xaa = Pro
  VARIANT 169: Xaa = Arg or Lys
  VARIANT 173: Xaa = Leu or Val
cctcagatcactctttggcaacgaccagtcgtcacaataaaggtaggggggcagctaaaggaagctctattagatacaggagcagatgatacagtattagaagaaatgaatttgccaggaagatggaaaccaaaaatgatagggggaattggaggttttrtcaaagtaagacagtatgatcaaatacccatagaaatctgtggacataaagctacaggtacagtattagtaggacctacacctgycaacataattggaagaaatctgttgactcagattgggtgcactttaaattttcctattagtcctattgaaactgtaccagtaaaattaaagccaggaatggatggcccaaaagttaaacaatggccactgacagaagaaaaaataaaagcattagtagaaatttgtgcagaattggaaaaggaagggaagatttcaaaaattgggccygaaaatccatacaayactccagtatttgccataaagaaaaaraacagtactaratggagaaaaktagtagatttcagagaacttaataagagaactcaagatttctgggaagttcaattaggaataccacatcccgcagggctaaagaagaaaaaatcagtaacagtactggatgtgggtgatgcatatttttcagttcccttggatgaagacttcagaaagtatacagcctttacctatactggttccaacaatgagacaccagggattagatatcartacaatgtgcttccacagggatggaaaggatcaccagcaatattccaaagcagcatgacaaaagtcttagaaccttttagaaaacaaaatccagacatagttatctgtcaatacatggatgatttgtatgtaggatctgacttagaaatagggcagcatagaacaaaaatagaggaactgagacaacatctgttaaggtggggattttacacaccagacgaaaaacatcagaaagaacctccattcctttggatgggttatgaactccatcctgacaaatggacagtacagcctatagtgctgccagaaaaagacagctggactgttaatgacatacagaaattagtgggaaaattgaattgggccagtcagatttacccaggg

SEQ ID NO: 37 - DNA, 1116 bp, Human Immunodeficiency Virus (HIV)
  CDS (1)...(297): HIV Protease
  CDS (298)...(1116): Portion of HIV Reverse Transcriptase
cctcagatcactctttggcaacgacccctcgtcacaataaaaataggggggcaactaaaggaagctctattagatacaggagcagatgatacagtattagaagacatgaatttgccaggaagatggaaaccaaaaatgatagggggaattggaggttttatcaaagtaagacagtatgatcaggtacccatagaaatctgtggacataaagctataggtacagtattagtaggacctacacctgtcaacataattggaagaaatctgatgacacagcttggttgtactttaaattttcctattagtcctattgaaactgtaccagtaaaattaaagccaggaatggatggcccaaaagttaaacaatggccattgacagaagaaaaaataaaagcattagtagaaatttgtacagaaatggaaaaggaagggaaaatttcaaaaattgggcctgaaaatccatacaatactccagtatttgccataaagaaaaaagacagtactaaatggagaaaattagtagatttcagggaacttaataagaaaactcaagacttctgggaagttcaattagggataccacatcctgcaggattaaaaaagaataaatcagtaacagtactggatgtgggtgatgcatatttttcagttcccttagataaagacttcaggaagtatactgcatttaccatacctagtataaacaatgagacaccagggattagatatcagtacaatgtgcttccacagggatggaaaggatcaccagcaatattccaaagtagcatgacaaaaattttagatccttttagaaaacagaatccagatatagttatctatcaatacatggatgatttgtatgtaggatctgacttagagatagggcagcatagagcaaaaatagaggaactgagagcacatctgttgaagtggggatttaccaccccagacaaaaaacatcagaaagaacctccattcctttggatgggttatgaactccatcctgataaatggacagtacagcctatagtgctgccagaaaaggacagctggactgtcaatgacatacagaagttagtgggaaaattaaattgggcaagtcagatttacgcaggg

SEQ ID NO: 38 - DNA, 1117 bp, Human Immunodeficiency Virus (HIV)
  CDS (1)...(297): HIV Protease
  CDS (298)...(1117): Portion of HIV Reverse Transcriptase
  misc_feature 1110: n = a, c, t or g
  VARIANT 10: Xaa = Ile or Leu
  VARIANT 36: Xaa = Ile or Thr
  VARIANT 37: Xaa = Asn or Asp
  VARIANT 318: Xaa = Arg or Lys
  VARIANT 370: Xaa = Tyr or Stop codon
  VARIANT 371: Xaa = Cys or Ser
cctcaatcacttctttggcaacgacccmtcgtcacaataaaggtaggggggcagctaaaggaagctctattagatacaggagcagatgatacaatattagaagacayaratttgccagggagatggaaaccaaaaataatagggggaattggaggttttatcagagtaagacagtatgatcaggtacccatagaaatctgtggacataaagttgtaagtacagtattagtaggacctacacctgccaacataattggaagaaatctgatgactcagattggttgcactttaaattttcccattagtcctattgaaactgtaccagtaaaattaaagccaggaatggatggcccaaaagttaaacaatggccattgacagaagaaaaaataaaagcattagtagaaatttgtgaagaattggaaaaggatgggaaaatttcaaaaattgggcctgaaaatccatacaatactccagtatttgccataaagaaaaagaacagtactaaatggagaaaattagtagatttcagagaacttaataagagaactcaagacttctgggaagttcaattaggaataccacatcctgcaggattaaaaaagaaaaaatcagtaacagtactggatgtgggtgatgcatatttttcaattcccttagatgaagacttcagaaagtatactgcatttaccatacctagtataaacaatgagacaccagggattagatatcagtacaatgtgcttccacagggatggaaaggatcaccatcaatattccaaagtagcatgacaaaaatcttagagccttttagaaaacaaaatccagacatagtcatctatcaatatatggatgatttgtatgtaggatctgacttagagatagggcagcatagaacaaaaatagaggaactgagacagcatctgtggaagtgggggttttacacaccagacaraaaacatcagaaagaacctccattcctttggatgggttatgaactccatcctgacaaatggacagtacagcctatagtgctgccagaaaaggacagctggactgtcaatgacatacagaagttagtgggaaaattgaattgggcaagtcagatttantscaggg

SEQ ID NO: 39 - DNA, 1128 bp, Human Immunodeficiency Virus (HIV)
  CDS (1)...(297): HIV Protease
  CDS (298)...(1128): Portion of HIV Reverse Transcriptase
  VARIANT 54, 93: Xaa = Ile or Leu
  VARIANT 107: Xaa = Glu or Val
  VARIANT 221: Xaa = Glu or Lys
  VARIANT 224: Xaa = Glu or Gly
  VARIANT 234: Xaa = Arg
  VARIANT 358: Xaa = Gln or Lys
cctcagatcactctttggcaacgaccattcgtcacaataaaaataggggggcaactaaaggaagctatattagacacaggagcagatgatacagtattagaagaaatgaatttgccaggaagatggaaaccaaaaatgatagggggaattggaggttttmtcaaagtaagacagtatgatcaggtacccatagaaatctgtggacataaagttatgagtacagtattaataggacctacacctgtcaacataattggaagaaatctgatgactcagmttggctgcactttaaattttcccattagtcctattgaaactgwaccagtaaaattaaagccagggatggacggcccaaaagttaaacaatggccattgacagaagaaaaaataaaagcattagtagaaatttgtacagaattggaaaaggaaggaaaaatttcaaaaattgggcctgaaaatccatacaatactccagtatttgccataaagaaaaaagacagtaataaatggagaaaattagtagatttcagagaacttaataagagaactcaagatttctgggaagtccaattaggaataccacatcctgcagggttaaaaaagaacaaatcagtaacagtactggatgtgggtgatgcatatttttcagttcccttagatraagattcagraagtacactgcatttaccatacctagtacgraccaatgagacaccagggattagatatcaatacaatgtgcttccacaaggatggaaaggatcaccagcaatattccaaagtagcatgacaaaaatcttagagccttttagaaaacaaaatccagacttagttatctgtcaatacatggatgatttgtatgtaggatctgatttagaaatagagcagcatagaacaaaaatagaggaactgagacaacatctgtggaagtgggggttttacacaccagacaaaaaacatcagaaagaacctccattccgttggatgggttatgaactccatcctgataaatggacagtacaagcctataaagctgccagaaaaagacagctggactgtcaatgacattacmagaaagttagtggggaaaattggaatttggggcaaggtcagatttattgccagggg

SEQ ID NO: 40 - DNA, 1120 bp, Human Immunodeficiency Virus (HIV)
  CDS (1)...(297): HIV Protease
  CDS (298)...(1120): Portion of HIV Reverse Transcriptase
  misc_feature 1066: n = a, c, t or g
  VARIANT 63: Xaa = Pro
  VARIANT 64: Xaa = Ile or Val
  VARIANT 93: Xaa = Ile or Leu
  VARIANT 224: Xaa = Arg
  VARIANT 356: Xaa = Asn, Asp, His or Tyr
  VARIANT 367: Xaa = Ala or Pro
cctcagatcactctttggcaacgacccctcgttgcaataaagatagggggacagctaaaggaagctctattagatacaggagcagatgatacagtattagaagaaatgagtttgccaggaagatggaaaccaaaaatgatagggggaattggaggttttatcaaagtaagacartatgatcagataccmrtagaaatttgcggacataaagctgtaggtacagtattagtaggacctacacctgtcaacataattggaagaaatctgttgactcagmttggttgcactttaaattttcccattagtcctattgaaactgtaccagtgaaattaaagccaggaatggatggcccaaaagttaaacaatggccattgacagaagaaaaaataaaagcattagtagaaatttgtacagaaatggaaaaggaagggaaaatttcaaaaattgggcctgaaaatccatacaatactccagtatttgccataaagaaaaaagacagtactaaatggagaaaattagtagatttcagagaacttaataagagaactcaagacttctgggaagttcaattaggaataccacatcctgcagggttaaaaaagaaaaaatcagtaacagtactggatgtgggtgatgcatatttttcagttcctttagatgaagacttcagraagtatactgcatttaccatacctagtacaaacaatgagacaccagggattagatatcagtccaatgtgcttccacagggatggaaaggatcaccagcaatattccaaagtagcatgacaaaaatcctagaaccttttaggaaacaaaatccagatatagttatctatcaatacatggatgatctatatgtaggatctgacttagaaatagaacagcatagaacaaaaatagaggaactgagacaacatctgttgaggtgggggtttaccaccccagacaaaaaacatcagaaagaacccccattcctttggatgggttatgaactccatcctgataaatggacagtacagcctatagtgctgccagaaaaagacagctggactgtcaatgacnatacaaaagttagtggggaaaattgaattgggscaagtcagatttattggaggg

SEQ ID NO: 41 - DNA, 1059 bp, Human Immunodeficiency Virus (HIV)
  CDS (1)...(297): HIV Protease
  CDS (298)...(1059): Portion of HIV Reverse Transcriptase
  misc_feature 775, 776, 777, 778, 779, 780, 781, 782, 783, 784, 785, 786, 787, 788,789, 790, 791, 792, 793, 794, 795, 796, 797, 798, 799, 780, 781, 782, 783,784, 785, 786, 787, 788, 789, 790, 791, 792, 793, 794, 795, 796, 797, 798,799, 800, 801, 802, 803, 804, 805, 806, 807, 808, 809, 810, 811, 812, 813,814, 815, 816, 817, 818, 819, 820, 821, 822, 823, 824, 825, 826, 827, 828,829, 830, 831, 832, 833, 834, 835, 836, 837: n = a, c, t or g
  VARIANT 259, 260, 261, 262, 263, 264, 265, 266, 267, 268, 269, 270, 271, 272,273, 274, 275, 276, 277, 278, 279: Xaa = Any Amino Acid
cctcaaatcactctttggcagcgacccgttgtcacaataaacataggggggcaactaaaggaagctctattagacacaggagcagatgatacagtattagaagaaatgaatttgccaggaagatggaaaccaaaaatgatagggggaattggaggttttatcaaagtaagacagtatgatcagatacccatagaaatctgtggacataaaactataggtacagtattaataggacctacacctgtcaacataattggaagaaatctgttgactcagattggctgcactttaaattttcccattagtcctattgaaactgtaccagtaaaattaaagccaggaatggatggcccaaaagttaaacaatggccattgacagaagaaaaaataaaagcattaatagaaatttgtacagaaatggaaaaggaagggaaaatttcaaaaattgggcctgaaaacccgtacaatactccagtctttgccataaagaaaaaagatagtactaaatggagaaaattagtagatttcagagaacttaacaagaaaactcaagacttctgggaaattcaattaggaataccacatcccgcagggttaaaaaagaaaaaatcagtaacagtactggatgtgggtgatgcatatttctcagttcctttagataaagacttcaggaagtatactgcatttaccatacctagtacaaacaatgagacgccagggattagatatcagtacaatgtgcttccacagggatggaaaggatcaccagccatannnnnnnnnnnnnnnnnnnnnnnnnnnnnnnnnnnnnnnnnnnnnnnnnnnnnnnnnnnnnnntatcaatacatggatgatttgtatgtaggatctgacttagaaatagagcagcatagaacaaaaatagagaaactgagacaacatctgttgaggtggggatttaccacaccagataaaaaacatcagaaagaacctccatttctttggatgggttatgaactccatcctgataaatggacagtacagcctatagtactgccagaaaaagacagctggactgtc

SEQ ID NO: 42 - DNA, 1053 bp, Human Immunodeficiency Virus (HIV)
  CDS (1)...(297): HIV Protease
  CDS (298)...(1053): Portion of HIV Reverse Transcriptase
  VARIANT 14: Xaa = Arg or Lys
  VARIANT 54: Xaa = Ile
  VARIANT 63: Xaa = Leu or Pro
  VARIANT 69: Xaa = His or Tyr
  VARIANT 74: Xaa = Thr
  VARIANT 84: Xaa = Ile or Val
  VARIANT 90: Xaa = Leu or Met
  VARIANT 173: Xaa = Leu
  VARIANT 240: Xaa = Gly or Trp
  VARIANT 310: Xaa = Arg or Lys
cctcagatcactctttggcaacgacccctcgtcacaataargataggggggcaactaaaggaagctctattagatacaggagcagatgatacagtattagaagaaatgaatttgccaggaagatggaaaccaaaaatgatagggggaattggaggttttatmaaagtaagacagtatgatcagatacycatagaaatctgtggayataaagctataggtacrgtattagtaggacccacgcctgtcaacrtaattggaagaaatctgwtgactcagattggttgcactttaaattttcccattagtcctattgaaactgtaccagtaaaattaaagccaggaatggatggcccaaaagttaaacaatggccattgacagaagaaaaaataaaagcattagtagaaatttgtacagaaatggaaaaggaaggaaaaatttcaaaaattgggcctgaaaatccatacaatactccagtatttgccataaagaaaaaagacagtactaaatggagaaaattrgtagatttcagagaacttaataagaaaactcaagacttctgggaagtccaattaggaataccacatcccgcagggttaaagaagaaaaaatcagtaacagtactggatgtgggtgatgcatatttttcagttcccttagataaagacttcaggaagtatactgcatttaccatacctagtgtaaacaatgagacaccakggattagataycagtacaatgtgcttccacaaggatggaaaggatcaccagcaatattycaatgtagcatgacaaaaatcttagagccttttagaaagcaaaatccagacctagttatttatcaatacatggatgatttgtatgtaggatctgacttagaaatagggcagcatagaacaaaaatagaggaactgagacaacatctgttgaratggggatttaccacaccagacaaaaaacatcagaaagaacccccattcctttggatgggttatgaactccatcctgataaatgggcagtgcaacctatagtgctgccagaaaaagacagctgg

SEQ ID NO: 43 - DNA, 1082 bp, Human Immunodeficiency Virus (HIV)
  CDS (1)...(297): HIV Protease
  CDS (298)...(1082): Portion of HIV Reverse Transcriptase
  VARIANT 13, 15: Xaa = Ile or Val
  VARIANT 23, 24: Xaa = Leu
  VARIANT 66: Xaa = Ile
  VARIANT 227: Xaa = Ser or Thr
  VARIANT 312: Xaa = Gly
cctcaaatcactctttggcaacgaccccttgtcacartaaagrtaggggggcaactaaaggaagctytattrgatacaggagcagatgatacagtattagaagaaatgaatttaccaggaagatggaaaccaaaaatgatagggggaattggaggttttatcaaagtaagacagtatgatcagatacccatagaaatytgtgggcataaagctataggtacagtattagtagggcctacacctgtcaacataattggaagaaatttgttgactcagattggttgcactttaaattttcctattagtcctattgaaactgtaccagtaaaattaaagccaggaatggatggccccaaagttaaacaatggccattgacagaagaaaaaataaaagcattagtagaaatttgtacagaaatggaaaaagaagggaaaatttcaaaaattgggcctgaaaatccatacaatactccagtatttgccataaagaaaaaggacagtactaaatggagaaaattagtagatttcagagaacttaataagagaactcaagacttttgggaagttcaattaggaataccgcatcccgcagggttaaaaaagaaaaagtcagtaacagtactggatgtgggtgatgcatatttttcagttcccttagataaagacttcaggaaatatastgcatttaccataccgagtataaacaatgagacaccagggattagatatcagtacaatgtgcttccgcagggatggaaaggatcaccagcaatattccaatgtagcatgacaaaaatcttagaaccttttagaaaacaaaatccagacatagttatctatcaatacatggatgatttgtatgtaggatctgacttggaaatagggcagcatagaacaaaaatagaggaactgagacagcatctgttgaaatggggrtttaccacaccagacaagaaacatcagaaagaacctccattcctttggatggggtatgaactccatcctgataaatggacagtacaaccgatagagctgccagaaaaagaaagctggactgtcaatgacatacagaagttagtggg

SEQ ID NO: 44 - DNA, 1116 bp, Human Immunodeficiency Virus (HIV)
  CDS (1)...(297): HIV Protease
  CDS (298)...(1116): Portion of HIV Reverse Transcriptase
  VARIANT 23, 191: Xaa = Leu
  VARIANT 67: Xaa = Leu or Stop codon
  VARIANT 167: Xaa = Ser
  VARIANT 169: Xaa = Arg or Stop codon
  VARIANT 202: Xaa = Asn or Lys
  VARIANT 234: Xaa = Ile or Val
cctcagatcactctttggcaacgacccatcgtcacagtaaagataggggggcaactaaaggaagctytattagatacaggagcagatgatacagtattagaagaaatgaatttaccaggaaaatggaaaccaaaaataatagggggaattggaggttttgccaaagtaagacagtatgatcagatacccatagaaatctkaggacataaagttataggtacagtcttagtaggacctacacctgccaacataattggaagaaatctgttgactcagattggttgcactttaaattttcccattagtcctattgaaactgtaccagtaaaattaaagccaggaatggatggcccaaaagttaaacaatggccattgacagaagaaaaaataaaagcattagtagaaatttgtacagaaatggaaaaggaaggaaaaatttcaaagattgggcctgaaaatccatacaatactccagtatttgccataaagaaaaaaaacagyactwgatggagaaaattagtagatttcagagaacttaataagagaactcaagacttctgggaagttcaattrggaataccacatccctcagggttaaaaaagaamaaatcagtaacagtactggatgtgggtgatgcatatttttcagttcccttagataaagacttcaggaaatatactgcatttaccatacctagtrtaaacaatgagacaccagggattagatatcagtacaatgtgcttccacagggatggaaaggatcaccagcaatattccaaagtagcatgacaagaatcctagagccttttagaaaacagaatccagacatagttatctatcaatacgtggatgacttgcttgtaggatctgatttagaaatagggcaacatagagcaaaaatagaggaactgagacaacatctgttgaggtgggggtttatcacaccagacgaaaaacatcagaaagaacctccattcctttggatgggttatgaactccatcctgataaatggacagtacagcccatagtgctgccagaaaaagayagctggactgtcaatgacatacaaaagttagtgggaaaattgaattgggcaagccagatttatgcaggg

SEQ ID NO: 45 - DNA, 1116 bp, Human Immunodeficiency Virus (HIV)
  CDS (1)...(297): HIV Protease
  CDS (298)...(1116): Portion of HIV Reverse Transcriptase
  VARIANT 10, 207, 217: Xaa = Ile or Val
  VARIANT 131: Xaa = Gln or Lys
cctcagatcactctttggcaacgacccrtcgtcacaataaagataggggggcagctaaaggaagctctattagatacaggagcagacgatacagtattagaagaaatgaatttaccaggaaaatggaaaccaaaaatgatagtgggaattggaggatttgtcaaagtaaaacagtatgagcaaatacctgtagaaatctgtggacataaagctgtaggtacagtattagtaggacctacacctgccaacataattggaagaaatctgttgactcagattggttgcactttaaattttcccattagtcctattgaaactgtaccagtaaaattaaagccaggaatggatggcccaaaagttaaacaatggccattgacaaaagaraaaatamaagcattggtagaaatttgtacagaaatggaaaaggaaggaaaaatttcaaaaattgggcctgaaaatccatacaatactccagtgtttgctataaagaaaaagaacagtgatagatggagaaaattagtagatttcagagaacttaataagaggactcaagacttctgggaaattcaattaggaataccacatcccgcagggttaaaaaagaagaaatcagtaacartactagatgtgggtgatgcatatttttcarttcccttagataaagaattcaggaagtatactgcatttaccatacctagtataaacaatgagacaccagggattagatatcaatacaatgtgcttccacaaggatggaaaggatcaccagcaatattccaagctagcatgacaaaaatcttagagcctttcagaaaacaaaatccagaactagttatctatcaatacgtggatgacttgtatgtaggatctgacttagaaataggacagcatagaacaaaaatagaggaactgagagaacatctgttaaaatggggattattcacaccagaccagaaacatcagaaagaacccccatttctttggatgggttatgaactccatcctgataaatggactatacagcctatggtgctgccagaaaaagacagctggactgtcaatgacctacagaagttagtgggaaaattgaattgggcaagtcagatttatccaggg

SEQ ID NO: 46 - DNA, 1116 bp, Human Immunodeficiency Virus (HIV)
  CDS (1)...(297): HIV Protease
  CDS (298)...(1116): Portion of HIV Reverse Transcriptase
  VARIANT 340: Xaa = Val
cctcaaatcactctttggcaacgacccctcgtcacaataaaagtaggggggcaactaaaggaagctctattagatacaggagcagatgatacagtattagaagaaatgaatttgccaggaaggtggaaaccaaaaatgatagggggaattggaggttttatcaaagtaagacagtatgatcagatatccatagaaatctgtggacataaagctataggtacagtattagtaggacctacacctgtcaacataattggaagaaatctgttgactcagattggttgcactttaaattttcctattagtcctattgaaactgtaccagtaaaattaaagccaggaatggacggcccaaaagttaaacaatggccattgacagaagaaaaaataaaagcattagtagagatttgtacagaaatggaaaaggaaggaaaaatttcaaaaattgggcctgaaaacccatacaatactccagtatttgccataaagaaaaaagacagtactaagtggagaaaattagtagatttcagagaacttaataaaagaactcaagacttctgggaggttcaattaggaataccacatcccgcagggttaaaaaagaaaaaatcagtaacagtactagatgtgggcgatgcatatttctcagttcccttagatgaagacttcagaaaatatactgcatttaccatacctagtataaacaatgagacaccagggactagatatcagtacaatgtgctcccacagggatggaaaggatcaccagcaatattccaatgtagcatgacaaaaatcttagagccttttagaaaacaaaatccagacctagttatctatcaatacatggatgatttgtatgtaggatctgacttagaaataggacagcatagaacaaaaatagaggaactgagacaacatctgttgaggtggggatttaccaccccagacaaaaaacatcagaaagaacctccatttctttggatgggttatgaactccatcctgataaatggacagtrcagcctatagtgctgccagaaaaagacagctggactgtcaatgacatacagaagttagtgggaaaattgaattgggcaagtcagatttacccaggg

SEQ ID NO: 47 - DNA, 1116 bp, Human Immunodeficiency Virus (HIV)
  CDS (1)...(297): HIV Protease
  CDS (298)...(1116): Portion of HIV Reverse Transcriptase
  VARIANT 108, 324: Xaa = Pro
  VARIANT 114, 192, 330: Xaa = Gly
  VARIANT 131: Xaa = Arg or Lys
  VARIANT 304: Xaa = Leu
  VARIANT 313: Xaa = Leu or Phe
cctcaaatcactctttggcaacgacccctcgtcacagtaaagataggggggcaactaaaggaagctctattagatacaggagcagatgatacagtattagaagacatgtgtttgccaggaagatggaaaccaaaaatgatagggggaattggaggttttatcaaagtaagacaatatgatcaggtagccatggaaatctgtggacataaggctataggtacagtattaataggacctacacctgtcaacataattggaagaaatctgttgactcagattggttgcactttaaattttcccattagccctattgaaactgtaccmgtaaaattaaagccaggratggatggtccaagggttaaacaatggccattgacagaagaaaaaataaragcattagtagaaatttgtacagaaatggaaaaggaaggaaaaatttcaaaaattgggcctgaaaatccatacaatactccagtatttgccataaagaaaaaagacagtactaaatggagaaaattagtagattttagagaacttaataagaaaactcaagacttytgggaagttcaattaggrataccgcatcccgcagggttaaaaaagaaaaaatcagtaacagtacttgatgtgggagatgcatatttttcagttcccttagataaagatttcaggaagtatactgcatttaccatacctagtataaacaatgagacaccagggattagatatcaatacaatgtgcttccacagggatggaaaggatcaccagcaatattccaaagtagcatgacaaaaattttagagccttttagaaagcaaaatccagacatagttatctatcaatacgtggatgatttgtatgtaggatctgacttagaaataggacagcatagaacaaaaatagaggaactragacaacatctgttgaagtgggggyttaccacaccagacaagaaacatcagaaagaaccyccattcctttggatgggktatgaactccatcctgataaatggacagtacagcctatagtgctgccagaaaaagacagctggactgtcaatgacatacagaagttagtgggaaarttgaattgggcaagtcagatttatgcaggg

SEQ ID NO: 48 - DNA, 1115 bp, Human Immunodeficiency Virus (HIV)
  CDS (1)...(297): HIV Protease
  CDS (298)...(1115): Portion of HIV Reverse Transcriptase
  VARIANT 161: Xaa = Ala
  VARIANT 248: Xaa = Leu
cctcagatcactctttggcaacgacccctcgtcacagtaaagataggggggcagctaaaggaagctctattagatacaggagcagatgatacagtaatagaagacatagaattgccaggaagatggaaaccaaaaatgatagggggaattggaggttttatcaaagtaaaacagtatgagcaggtacccatagaactctgtgggcgtaaaactataggtacagtattagtaggacctacacctgtcaacataattggaagaaacctgatgactcagattggttgcactttaaattttcccattagtcctattgaaactgtaccagtaaaattaaagccaggaatggatggcccaaaagttaaacaatggccattgacagaagaaaaaataaaagcattaatagaaatttgtacagaaatggaaaaggaagggaaaatttcaaaaattgggcctgaaaatccatacaacactccagtatttgcyataaagaaaaaagacagtactaaatggagaaaattagtagatttcagagaacttaataagaaaactcaagacttctgggaagttcaattaggaataccacatcctgcagggttaaaaaagaagaaatcagtaacagtattggatgtgggtgatgcatatttttcagttccgttagataaagacttcaggaagtatactgcatttaccatacctagtataaacaatgagacaccagggattagatatcagtacaatgtgctkccacagggatggaagggatcaccagcaatattccaaagtagcatgacaaaaatcttggagccctttagaaaacaaaatccagacctagttatctatcaatacatggatgatttgtatgtaggctctgacttagaaatagggcagcatagaacaaaaatagaggaactgagacaacatctgttgaagtggggatttaccacaccagataaaaaacatcagaaagaacctccatttctttggatgggttatgaactccatcctgataaatggacagtacagcctatagtgctgccagaaaaagacagctggactgtcaatgacatacagaagttagtgggaaaattgaattgggcaagtcagatttcccarga

SEQ ID NO: 49 - DNA, 1116 bp, Human Immunodeficiency Virus (HIV)
  CDS (1)...(297): HIV Protease
  CDS (298)...(1116): Portion of HIV Reverse Transcriptase
  VARIANT 12: Xaa = Ala or Thr
  VARIANT 202: Xaa = Asn or Lys
cctcagatcactctttggcaacgacccctcgtcrcaataaagataggggggcagctaaaggaagctctattagatacaggagcagatgatacagtattagaagaaatgaatttgccaggaagatggaaaccaaagatgatagggggaattggaggtttcatcaaagtaagacagtatgatcagatacccatagaaatctgtggccataaagctataggtacagtattagtaggacctacacctgtcaacataattggaagaaatctattgactcagattggttgcactttaaattttcccattagtcctattgaaactgtaccagtaaagttaaagccaggaatggatggcccaaaagttaaacaatggccattgacagaagaaaaaataaaagcattagtagaaatctgtacagaaatggaaaaggaagggaaaatttcaaaaattgggcctgaaaatccatacaatactccagtatttgccataaagaaaaaggacagtactaaatggagaaaattagtagatttcagagaacttaataagaaaactcaagacttctgggaagttcaattaggaataccacatcctgcagggttaaaaaagaamaaatcagtaacagtactggatgtgggtgatgcatatttttcagttcccttagataaagaattcaggaagtataccgcatttccatccctagttataaacaatgagacaccaggaatcagatatcagtacaatgtgcttccacagggatggaaaggatcaccagcaatatttcaaagtagcatgacaaaaatcttagagccttttagaaaacaaaatccagacatagttatctatcaatacgtggatgatttgtatgtaggatctgacttagaaatagggcagcatagaacaaaagtagaggagctgagacaacatctgttgaggtggggatttaccacaccagacaaaaaacatcagaaagagcctccattcctttggatgggttatgaactccatcctgataaatggacagtacagcctatagtgctgccagaaaaagacagctggactgtcaatgacatacagaagttagtgggaaaattaaattgggcaagccagatttacccaggg

SEQ ID NO: 50 - DNA, 1116 bp, Human Immunodeficiency Virus (HIV)
  CDS (1)...(297): HIV Protease
  CDS (298)...(1116): Portion of HIV Reverse Transcriptase
  VARIANT 53: Xaa = Leu or Phe
  VARIANT 71: Xaa = Ala or Val
  VARIANT 200: Xaa = Asn, Gln, His or Lys
cctcagatcactctttggcaacgacccttcgtcaacataaagatagggggacaactgaaggaagctctattggatacaggagcagatgatacagtattagaagaaatgaatttgccaggaagatggaaaccaaaattgatagggggaattggaggtttkgtcaaagtaagacagtatgatcagatacctgtagaaatttgtggacataaagytataggtacagtcttagtaggacctacacctgccaacataattggaagaaatctgttgactcagattggctgcactttaaattttcccattagtcctattgaaactgtaccagtaaaattaaagccaggaatggatggcccgagagttaaacaatggccattgacagaagaaaaaataaaagcattagtagaaatttgtacagaattggaaaaggaaggaaaaatttcaaagattgggcctgaaaatccatacaatactccaatatttgccataaagaaaaagaacagtactaaatggagaaaattagtagatttcagagaacttaataagagaactcaagacttctgggaagttcaattaggaataccacatcccgcagggttamamaagaacaaatcagtaacagtgctagatgtgggtgatgcatatttttcagttcccttatatgaagacttcaggaagtatactgcatttaccatacctagtacaaacaatgagacaccagggattagatatcagtayaatgtgcttccacagggatggaaaggatcaccagcaatattccagagtagcatgacaagaatcttagagccttttagaaaacaaaatccagaaatagtcatctatcaatacgtggatgatttgtatgtagcatctgacttagaaatagagaaacatagaacaaaaatagaggaactgagacaacatctgttgaggtggggattttacacaccagacaaaaagcatcagaaagaacctccattcctttggatgggttatgaactccatcctgataaatggacagtacagcctatagtgctgccagaaaaagacagctggactgtcaatgacatacagaaattagtgggaaaattgaattgggcaagtcagatttatggaggg

SEQ ID NO: 51 - DNA, 1116 bp, Human Immunodeficiency Virus (HIV)
  CDS (1)...(297): HIV Protease
  CDS (298)...(1116): Portion of HIV Reverse Transcriptase
  VARIANT 54: Xaa = Ile
cctcagatcactctttggcaacgacccatcgtcacaataaagataggggggcaactaaaggaagctctattagatacaggagcagatgatacagtattagaagaaatgaatttgccaggaagatggaaaccaaaaataatagggggaattggaggttttatyaaagtaagacagtatgatcagatacctatagaaatctgtggacataaaactataggtacagtattaataggacctacacctgccaacataattggaagagatctgttgactcagattggttgcactttaaattttcccattagtcctattgaaactgtaccagtaaaattgaagccaggaatggatggtccaaaagttaaacaatggccattgacagaagaaaaaataaaagcattagtagaaatttgtacagaactggaaaaggatgggaaaatttcaaaaattgggcctgaaaatccatacaatactcctgtatttgccataaagaaaaaaaacagtactaaatggagaaaattagtagatttcagagaacttaataagagaactcaagacttctgggaagttcaattaggaataccacatcccgcggggttaaaaaagaaaaaatcagtaacagtactggatgtgggtgatgcatatttttcaattcccttagatgaagaattcaggaagtatactgcattcaccatacctagtataaacaatgagacaccaggggttagatatcaatacaatgtgcttccacagggatggaaaggatcaccagcaatattccaaagtagcatgacaaaaatcttagagccctttagaaaacaaaatccagacatagttatctatcaatatgtggatgatttgtatgtaggatctgacttagaaatagggcagcatagagcaaaaatagaggaactgagacaacatctgtggaggtgggggttttacacaccagacaaaaaacatcagaaagaacccccattcctttggatgggttatgaactccatcctgataaatggacagtacaacctatagtgctgccagaaaaagacagctggactgtcaatgacatacagaaattagtggggaaattgaattgggcaagtcagatttatgcaggg

SEQ ID NO: 52 - DNA, 1116 bp, Human Immunodeficiency Virus (HIV)
  CDS (1)...(297): HIV Protease
  CDS (298)...(1116): Portion of HIV Reverse Transcriptase
  VARIANT 15: Xaa = Ile or Val
  VARIANT 46, 234: Xaa = Ile or Met
  VARIANT 63: Xaa = Pro or Ser
  VARIANT 85, 266: Xaa = Ile
  VARIANT 106: Xaa = Thr
  VARIANT 127: Xaa = Glu or Gly
  VARIANT 208: Xaa = Leu
cctcaaatcactctttggcaacgaccccttgtcacaataaagrtaggggggcaactaaaggaagctctattagatacaggagcagatgatacagtattagaagaaatgaatttgccaggaagatggaaaccaaaaatratagggggaattggaggttttatcaaagtaagacagtatgatcagatayccatagaaatctgtggacataaagctataggttcagtattagtaggacctacacctgtcaacataatyggaagaaatctgatgactcagattggttgcactttaaattttcccattagtcctattgaaackgtaccagtaaaattaaagccaggaatggatggcccaaaagttaagcaatggccattgacagragaaaaaataaaagcattagtagaaatttgtacagagatggaaaaggaagggaaaatttcaagaattgggcccgaaaatccatacaatactccaatatttgccataaagaaaaagaatagtactagatggagaaaattagtagatttcagggaacttaataagagaactcaagacttctgggaagttcaattaggaataccacatcccgcagggttaaaaaagaacaaatcagtgacagtaytggatgtgggtgatgcatatttttcagttcccttagatgaagacttcaggaagtatactgcatttaccatacctagtatraacaatgagaaaccagggattagatatcagtacaatgtgcttccacarggatggaaagggtcaccagcaatattccaatgtagcatgacaaaaatyttagagccttttagaaaacaraatccagacatagttatctatcaatacatggatgatttgtatgtaggatctgacttagaaatagaacagcatagaacaaaaatagaggaattgagacaacatctgttaaggtggggatttttcacaccagaacaaaaacatcagaaagaaccgccattcctttggatgggttatgaactacatcctgataaatggacggtacagcctataaagctgccagaaaaagatagctggactgtcaatgacatacagaagttagtgggaaaattaaattgggcaagtcagatttaygcaggg

SEQ ID NO: 53 - DNA, 1116 bp, Human Immunodeficiency Virus (HIV)
  CDS (1)...(297): HIV Protease
  CDS (298)...(1116): Portion of HIV Reverse Transcriptase
  VARIANT 62: Xaa = Ile or Val
cctcagatcactctttggcaacgacccatcgtcacaataaagataggggggcaactaaaagaagctctattagatacaggagcagatgatacagtattagaagaaatgaatttaccaggaagatggaaaccaaaaatgatagggggaattggaggttttatcaaagtgagacagtatgatcagrtacccatagaaatttgtggacataaagctataggtacagtattagtaggatctacacctgtcaacataattggaagaaatctgttgactcagcttgggtgcactttaaattttcccattagtcctattgaaactgtaccagtaaaattaaagccaggaatggatggcccaaaagttaaacaatggccattgacagaagaaaaaataaaagcattagtagaaatttgtacagagatggaaaaggaagggaaaatttcaaaaattgggcctgaaaatccatacaatactccagtatttgccataaagaaaaaagacagtactaaatggagaaaattagtagatttcagagaacttaataagaaaactcaagacttctgggaagttcaattaggaatcccacatcctgcagggttaaaaaagaaaaaatcagtaacagtactggatgtgggtgatgcatatttttcagttcccttagataaagacttccggaagtatactgcatttaccatacctagtacaaacaatgagacaccaggaattagatatcagtacaatgtgcttccacaaggatggaaaggatcaccagcaatattccaaagtagcatgacaaaaatcttagagccttttaggaataaaaatccagacatagttatctatcaatacgtggatgatttgtatgtaggatctgacctagaaatagggcagcatagagcaaaaatagaggaactgagagaacatctgttgaagtgggggtttactacaccagacaaaaaacatcagaaagaacctccattcctttggatgggttatgaactccatcctgataaatggacagtccagcctatagagctgccagaaaaagacagctggactgtcaatgacatacagaagttagtgggaaaattgaattgggcaagtcagatttatgcagga

SEQ ID NO: 54 - DNA, 1116 bp, Human Immunodeficiency Virus (HIV)
  CDS (1)...(297): HIV Protease
  CDS (298)...(1116): Portion of HIV Reverse Transcriptase
  VARIANT 10: Xaa = Ile
  VARIANT 23: Xaa = Leu
  VARIANT 302: Xaa = Glu or Lys
cctcagatcactctttggcaacgacccatygtcacaataaagataggggggcaactaaaggaagctytattagatacaggagcagatgatacagtattagaagacatggatttgccaggaagatggaaaccaaaaatgatagtgggaattggaggttttgtcaaagtaagacagtatgatcagatacccatagaaatctgtggacataaaattataggtacagtattaataggaaatacacctgccaacgtaattggaagaaatctgttgactcagcttggttgcactttaaattttcccattagtcctattgaaactgtaccagtaaaattaaagccaggaatggatggcccaaaagttaaacaatggccattgacagaagaaaaaataaaagcattagtagaaatttgtacagaactggaaaaggatgggaaaatttcaaaaattgggcctgaaaatccatacaatactccagtatttgccataaagaaaaaggacagtactaaatggagaaaagtagtagatttcagagaacttaacaagagaactcaagacttctgggaggttcaattaggaataccacaccccgcagggataaaaaagaataaatcagtaactgtactagatgtaggtgatgcatatttctcagttcccttagatgaagacttcagaaaatatactgcattcaccatacctagtattaacaatgagacaccagggattagatatcagtacaatgtgctcccacagggatggaaaggatcaccagcaatattccaaagtagcatgacaaaaatcttagagccttttagaaaacaaaatccagacatagttatctatcaatacatggatgatttgtatgtaggatctgacttagaaatagggcagcacagaataaaaataraggaactgagagaacatctatggaagtggggattttacacaccagacaaaaagcatcagaaagaacctccattcctttggatgggttatgaactccatcctgataaatggacagtacagcctataacgctgccagaaaaagacagctggactgtcaatgacatacagaagttagtggggaaattgaattgggcaagtcagatttatgcaggg

SEQ ID NO: 55 - DNA, 1116 bp, Human Immunodeficiency Virus (HIV)
  CDS (1)...(297): HIV Protease
  CDS (298)...(1116): Portion of HIV Reverse Transcriptase
  misc_feature 1114: n = a, c, t or g
  VARIANT 70: Xaa = Arg or Lys
  VARIANT 299: Xaa = Ala or Thr
  VARIANT 344: Xaa = Leu or Val
  VARIANT 370: Xaa = Tyr or Stop codon
  VARIANT 372: Xaa = Arg, Gly or Trp
cctcaaatcactctttggcaacgacccctcgtcgcaataaagataggggggcaactaaaggaagctctattagatacaggagcagatgatacagtcttagaagaaatgaatttgccaggaagatggaaaccaaaaatgatagggggaattggaggttttatcaaagtaaagcagtatgatcaggtacttgtagaaatttgtggacataragctataggtacagtattagtaggacctacacctgtcaacataattggaagaaatctgttgactcagattggttgtactttaaattttcccattagtcctattgaaactgtaccagtaaaattaaagccaggtatggatggcccaaaagttaaacaatggccattgacagaagaaaaaataaaagcattaatagaaatttgtacagaaatggaaaaggaagggaaaatttcaaaaattgggcctgaaaatccatacaatactccagtatttgccataaagaaaaaagacagtaccaaatggagaaaattagtagatttcagagaacttaataagaaaacgcaagacttctgggaagttcaattaggaataccacatcccgcagggttaaaaaagaaaaaatcagtaacagtactggatgtgggtgatgcatatttttcagttcccttagataaggacttcaggaagtatactgcatttaccatacctagtgtaaacaatgagacaccagggattagatatcagtacaatgtgctgccacagggatggaaaggatcaccagcaatatttcaaagtagcatgacaaaaatcttagagccttttagaaaacaaaatccagacatggttatctatcaatacatggatgatttgtatgtaggatctgacttagaaatagagcagcatagarcaaaaatagaggaactgaggcagcatctgttgaggtggggatttaccacaccagacaaaaagcatcagaaagaacctccattcctttggatgggttatgaactccatcctgataaatggacagtacagcctataktgctgccagaaaaagacagctggactgtcaatgacatacagaagttagtgggaaaattaaattgggcaagtcagatttamcccngg

SEQ ID NO: 56 - DNA, 1116 bp, Human Immunodeficiency Virus (HIV)
  CDS (1)...(297): HIV Protease
  CDS (298)...(1116): Portion of HIV Reverse Transcriptase
  VARIANT 293: Xaa = Glu or Lys
cctcaaatcactctttggcaacgacccattgtcacaataaagataggggggcaactaaaggaagctctattagatacaggagcagatgatacagtattagaagaaatgaatttgccaggaaaatggaaaccaaaaatgatagggggaattggaggttttatcaaagtaagacagtatgatcagataaccatagaaatctgtggacataaagctataggtacagtattagtaggacctacacctgtcaacataattggaagaaatctgttgactcagattggttgcactttaaattttcccattagtcctattgaaactgtaccagtaaaattaaagccaggaatggatggcccaaaagttaaacaatggccattgacagaagaaaaaataaaagcattagtagaaatttgtacagaaatggaaaaagaagggaaaatttcaaaaattgggcctgaaaatccatacaatactccagtatttgccataaagaaaaaagatagtactaaatggagaaaattagtagatttcagagaacttaataagagaactcaagacttctgggaagtacaattaggaataccacatcccgcagggttaaaaaagaaaaaatcagtaacagtactagatgtgggtgatgcatatttttcagttcccttagataaagaattcaggaagtatactgcattcaccatacctagtataaacaatgagacaccagggattagatatcagtacaatgtgcttccacagggatggaaaggatcaccagcaatattccaaagcagcatgacaaaaattttagaaccttttagaaaacaaaatccagaaatagttatctatcaatacatggatgatttgtatgtaggatctgacttaraaatagagcagcatagaacaaaaatagaggaactgagacaacatctgttgaggtggggatttaccacaccagacaaaaagcatcagaaagaacctccattcctttggatgggttatgaactccatcctgataaatggacagtacagcctatagtgctgccagaacaggacagctggactgtcaatgacatacagaagttagtgggaaaattaaattgggcaagtcagatttatccaggg

SEQ ID NO: 57 - DNA, 1116 bp, Human Immunodeficiency Virus (HIV)
  CDS (1)...(297): HIV Protease
  CDS (298)...(1116): Portion of HIV Reverse Transcriptase
  VARIANT 33: Xaa = Ile or Val
  VARIANT 183: Xaa = Thr
cctcagatcactctttggcaacgacccctcgtcacagtaaagttaggggggcaactaatggaagttctattagatacaggagcagatgatacagtartagaagaaataagtttaccaggaagatggaaaccaaaaatgatagggggaattggaggttttgtcaaagtaaaacagtatgatcaggtacccttagaaatttgtggaaaaaaggctataggtacagtattagtaggacctacacctgccaacataattggaagaaattttttggctcagattggttgcactttaaatttccccattagtcctattgaaactgtaccagtaaaattaaagccaggaatggatggcccaaaagttaaacaatggccattgacagaagaaaaaataaaagcattagtagaaatttgtacagaaatggaaaaggaagggaaaatttcaaaaattgggcctgaaaatccatacaatactccagtatttgccataaagaaaaagaacagtactagatggagaaaattagtagattttagagaacttaataagaggacscaagacttctgggaagttcaattaggaataccacatcccgcagggttaaaraagaacaaatcagtaacagtactggatgtgggtgatgcatatttttcagttcccttagatccagacttcaggaagtatactgcatttaccatacctagtacaaacaatgagacaccagggattagatatcagtacaatgtgcttccacaaggatggaaaggatcaccagcaatattccaaagtagcatgacaaaaatcttagagccatttagaaaacaaaatccagacatagttatctgtcaatacatggatgatttgtatgtaggatctgacttagaaatagagcagcatagaacaaaaatagaggaactgagacaacatctgttgaggtggggattttacacaccagaccaaaaacatcagaaagaacctccattcctttggatgggttatgaactccatcctgataaatggacagtacagcctataacgctgccagacaaagacagctggactgtcaatgacatacagaagttagtgggaaaattaaattgggcaagtcagatttatgcaggg

SEQ ID NO: 58 - DNA, 1116 bp, Human Immunodeficiency Virus (HIV)
  CDS (1)...(297): HIV Protease
  CDS (298)...(1116): Portion of HIV Reverse Transcriptase
cctcaaatcactctttggcaacgacccctagttacaataaaaataggggggcaactaaaggaagctctattagatacaggagcagatgatacagtattagaagaaatgactttgccaggaaaatggaaaccaaaaatgatagggggaattggaggttttatcaaagtaagacartatgatcagatactcatagaaatttgtggacataaagctataggtacagtattagtaggacctacacctgtcaacataattggaagaaatctgttgactcagatcggttgcactttaaattttcccattagtcctattgagactgtaccagtaaaattaaagccaggaatggatggcccaagagttaarcaatggccattgacagaagaaaaaataaaagcattagtagaaatttgtacagaaatggagaaggaagggaaaatttcaaaaattgggcctgaaaatccatacaatactccagtatttgccataaagaaaaaagacagtactaaatggagaaaattagtagatttcagagaacttaataagagaactcaagacttctgggaagttcaattaggaataccacatccagcagggttaaaaaagaaaaaatcagtaacagtactggatgtgggtgatgcatatttttcagttcccttagataaagacttcaggaagtatactgcatttaccatacctagtataaacaatgagacaccagggattagatatcagtacaatgtgcttccacagggatggaaaggatcaccagcaatattccaaagtagcatgacaataatcttagagccttttagaaaacaaaatccagacatagttatctatcaatacatggatgatttgtatgtaggatctgacttagaaatagggcagcatagaacaaaaatagaggaactgagacagcatctgttgaggtggggatttaccacaccagacaaaaaacatcagaaagaacctccattcctttggatgggttatgaactccatccagataaatggacagtacagcctataaagctgccagacaaagacagctggactgtcaatgacatacagaagttagtgggaaaattgaattgggcaagtcagatttatgcagga

SEQ ID NO: 59 - DNA, 1116 bp, Human Immunodeficiency Virus (HIV)
  CDS (1)...(297): HIV Protease
  CDS (298)...(1116): Portion of HIV Reverse Transcriptase
  VARIANT 16: Xaa = Glu or Gly
  VARIANT 45: Xaa = Gln or Lys
  VARIANT 134: Xaa = Ile or Val
  VARIANT 161: Xaa = Ala
  VARIANT 279: Xaa = Ile
  VARIANT 310: Xaa = Arg
  VARIANT 314: Xaa = Ser or Tyr
cctcaaatcactctttggcaacgacccttagtcacaataaagatagrggggcaactaaaagaagctctattagatacaggagcagatgatacagtattagaagaaataaatttgccagggaaatggaaaccamaaatgatagggggaattggaggttttattaaagtaagacagtatgatcaaatagccatagaaatttgtggacataaagctataggtacagtattagtaggacctacacctgtcaacataattggaagaaatctgttgactcagattggttgcactttaaattttcccattagtcctattgaaactgtaccagtaaaattaaagccaggaatggatggcccaaaagttaaacaatggccattgacagaagaaaaaataaaagcattartagaaatctgtacagaaatggaaaaggaagggaaaatttcaaaaattgggcctgaaaatccatacaatactccagtatttgcmataaagaaaaaagacagtactaaatggagaaaattagtagatttcagagaacttaataagagaactcaagacttctgggaagtccaattaggaataccacatcccgcagggttaaaaaagaaaaaatcagtaacagtactagatgtgggtgatgcatatttctcagttcccttagaccaagacttcaggaagtatactgcatttaccatacctagtataaacaatgagacaccagggattagatatcagtacaatgtgcttccacagggatggaaaggatcaccagcaatattccaaagtagcatgacaaggatcttagarccttttagaaaacaaaatccagaaatagtcatytatcagtacatggatgatttatatgtaggatctgacttagaaatagggcagcatagaacaaaagtagaggaactgagacaacatctgttgagrtgggggttttmcacgccagacaaaaagcatcagaaagaacctccattcctttggatgggttatgaactccatcctgataaatggacagtacagactatagaactgccagaaaaagatagctggactgtcaatgacatacagaagttagtgggaaaattgaattgggcaagtcagatatacccaggg

SEQ ID NO: 60 - DNA, 1116 bp, Human Immunodeficiency Virus (HIV)
  CDS (1)...(297): HIV Protease
  CDS (298)...(1116): Portion of HIV Reverse Transcriptase
  VARIANT 10: Xaa = Leu
  VARIANT 40: Xaa = Gly
  VARIANT 64: Xaa = Ile or Val
  VARIANT 200: Xaa = Glu or Lys
  VARIANT 239: Xaa = Pro
  VARIANT 262: Xaa = Ser
cctcaaatcactctttggcagcgacccctygtcacaataaagataggggggcaactaaaagaagctctattagayacaggagcagatgatacagtattagaagaaatgaatttgccaggragatggaaaccaaaaatgatagggggaattggaggttttatcaaagtaagacagtatgatcagatacctrtagaaatttgtggacataaagctataggtacagtattaataggacctacacctgtcaacataattggaagaaatctgatgactcagcttggctgcactttaaattttcctattagtcctattgaaactgtaccagtaaaattaaagccaggaatggatggcccaagagttaaacaatggccattgacagaagagaaaataaaagcattagtagaaatttgtacagaaatggaaaaggaaggaaaaatttcaaaaattgggcctgaaaatccatacaatactccagtatttgccataaagaaaaaagacagtaatagatggagaaaattagtggatttcagagaacttaataaragaactcaagacttctgggaagttcaattaggaataccacatcctgcagggttaraaaagaacaaatcagtaacagtactggatgtgggtgatgcatatttttcagttcccttagataaagaattcaggaagtatactgcatttaccatacctagtaccaataatgagacaccmggggttagatatcagtataatgtacttccccagggatggaaaggatcaccagcatatttycaatgtagyatgacaaaaatcttaaagcctttcaggaaacaaaatccacacatagttatttttcaatatgtggatgacttgtatgtagcatctgacttagaaatagagcagcatagaacaaaaatagaggaactgagacaacatttgttgaggtggggactcaccacaccagacaaaaaacatcaaaaagaacctccattcctttggatgggttatgaactccatcctgataaatggacagtacagcccataacgctgccagaaaaagacagctggactgtcaatgacatacagaagttagtgggaaaattgaattgggcaagtcagatttatgcaggg

SEQ ID NO: 61 - DNA, 1116 bp, Human Immunodeficiency Virus (HIV)
  CDS (1)...(297): HIV Protease
  CDS (298)...(1116): Portion of HIV Reverse Transcriptase
  VARIANT 41: Xaa = Glu or Lys
  VARIANT 59: Xaa = Ser or Tyr
  VARIANT 93: Xaa = Ile or Leu
  VARIANT 241: Xaa = Ala or Thr
cctcagatcactctttggcaacgacccctcgtcacaataaaagataggggggcaagtaaagaagctctattagatacaggagcagatgatacagtattagaagaaataaatttgccagggragtggaaaccaaaaatgatagggggaattggaggttttatcaaagtaagacagtmtgatcagatacccgtagaaatttgtggacataaggctataggtacagtattagtaggacctacacctgtcaacataattggaagaaatctgttgactcagmttggttgcactttaaattttcccatcagtcctattgaaactgtaccagtaaaattaaagccaggaatggatggcccaaaagttaaacaatggccattaacagaggaaaaaataaaagcattagtagaaatttgtacagaaatggaaaaggaagggaaaatttcaaaaattgggcctgaaaatccatacaatactccaatatttgccataaagaaaaaggacagtactaaatggagaaaattagtagatttcagagaacttaataagagaactcaagacttctgggaagttcagttaggaataccacatcctgcagggttaaaaaagaaaaaatcagtaacagtactggatgtgggtgatgcatatttttcagttcccttagatgaaagcttcaggaagtacactgcatttaccatacccagtacaaacaatgagacaccagggrcaagatatcagtacaatgtgcttccacagggatggaaaggatcaccagcaatattccaaagtagcatgacaaaaatcttagagccttttagaaaacaaaatccagaaatggttatctatcaatacatggatgatttgtatgtaggatctgacttagagatagagcaacatagaacaaaaatagaggaactgagacaacatctgttgaggtggggatttaccacaccagacaaaaaacatcagaaagaacctccatttctttggatgggttatgaactccatcctgataaatggacagtacagcctatagtgctgccagaaaaggacagctggactgtcaatgacatacagaagttagtgggaaaattaaattgggcaagtcagatttatccaggg

SEQ ID NO: 62 - DNA, 1116 bp, Human Immunodeficiency Virus (HIV)
  CDS (1)...(297): HIV Protease
  CDS (298)...(1116): Portion of HIV Reverse Transcriptase
  VARIANT 241: Xaa = Ile or Val
  VARIANT 280: Xaa = Cys or Tyr
  VARIANT 320: Xaa = His or Tyr
  VARIANT 359: Xaa = Leu
cctcaaatcactctttggcaacgacccatcgtcacaataaagataggggggcagctaaaggaagctctattagatacaggagcagatgatacagtattagaagaaatgaatttgccaggaagatggaaaccaaaaatgatagggggaattggaggttttatcaaagtaagacaatatgatcagatagccatagaaatctgtggacataaagctataggtacagtattaataggacctacacctgtcaacataattggaagaaatctgatgactcagattggctgcactttaaattttcccattagtcctattgatactgtaccagtaaaattaaagccaggaatggatggcccaaaagttaaacaatggccattgacagaagaaaaaataaaagcattagtagaaatttgtacagaaatggaaaaggaagggaaaatttcaaaaattgggcctgaaaatccatacaatactccagtatttgccataaagaaaaagaatagtactaaatggagaaaattagtagatttcagagaacttaataagagaactcaagacttctgggaagttcaattaggaataccacatcccgcagggctaaaaaagaayaaatcagtaacagtactggatgtgggtgatgcatatttttcagtccccttagatgaagacttcaggaagtacactgcatttaccatacctagtataaacaatgagacaccagggrttagatatcagtacaatgtgcttccacagggatggaaaggatcaccatcaatattccaatgtagcatgacgaaaatcttagagccttttagaaaacagaatccagacatagttatctrtcaatacatggatgatttgtatgtagcatctgacttagaaatagagcagcatagaataaaaatagaggaactaagacaacatctgttgaagtggggattttacacaccagacaaaaaayatcagaaagaacctccattcctttggatgggttatgarctccatcctgataaatggacagtacagcctatagtgctgccagaaaaagacagctggactgtcaatgacatacagaagttrgtgggaaaactgaattgggcaagtcagatttacccaggg

SEQ ID NO: 63 - DNA, 1116 bp, Human Immunodeficiency Virus (HIV)
  CDS (1)...(297): HIV Protease
  CDS (298)...(1116): Portion of HIV Reverse Transcriptase
  VARIANT 23: Xaa = Leu
  VARIANT 49: Xaa = Gly
  VARIANT 126: Xaa = Pro or Thr
  VARIANT 168: Xaa = Ile or Thr
cctcaaatcactctttggcaacgacccgttgttacagtaaggatagggggacagctaacggaagctytattagatacaggagcagatgatacagtattagaagaaatgactttgccaggaaaatggaaaccaaaaataatagggggrattggaggttttatcaaagtaagacagtatgatcacgtacttgtagaaatctgtggacataaagctataggtacagtattaataggacctacacctgtcaacataattggaagaaatttgatgactcagcttgggttcactttaaattttccaattagtcctattgaaactgtaccagtaaaattaaagccagggatggatggcccaaaagttaaacaatggccattgmcagaagaaaaaataaaagcactaacagaaatttgtacagaattggaaaaggaaggaaaaatttcaagaatagggcctgaaaatccatacaatactccaatatttgccataaagaagaaaaacggtaytaggtggagaaaattagtagatttcagagagctaaataagagaactcaagacttctgggaagttcaactaggaataccacatcctgcaggactaaaaaagaacaaatcagtaacagtactggatgtgggtgatgcatatttttcagttcccttacatgaagactttagaaagtataccgcattcaccatacctagtacaaacaatgaaacaccaggaattagatatcagtacaatgtgcttccacaaggatggaaaggatcaccggcaatattccaaagtagcatgaccaaaatcttagaaccttttagaaaacaaaatccagaaatggttatctatcaatacgtggatgatttgtatgtaggatctgacttagaaatagggcagcatagaataaaaatagaggaattaagggaacacctattgaagtggggatttttcaccccagacgaaaagcatcagaaagaacctccatttctttggatgggttatgaacttcatcctgataaatggacagtgcagcctataaaactgccagaaaaagaaagctggactgtcaatgatatacagaagttagtgggaaaattaaattgggcaagccagatttatccagga

SEQ ID NO: 64 - DNA, 1116 bp, Human Immunodeficiency Virus (HIV)
  CDS (1)...(297): HIV Protease
  CDS (298)...(1116): Portion of HIV Reverse Transcriptase
  VARIANT 46: Xaa = Ile or Met
  VARIANT 52: Xaa = Gly
  VARIANT 54, 278: Xaa = Ile or Val
  VARIANT 63: Xaa = Ala, Leu, Pro or Val
  VARIANT 82: Xaa = Ala or Val
  VARIANT 194: Xaa = Pro
  VARIANT 199, 292, 308: Xaa = Leu
  VARIANT 238: Xaa = Met or Thr
cctcagatcactctttggcaacgacccatcgtcacaataaagataggggggcaactaaaggaagctctattagatacaggagcagatgatacagtattagaagaaatgaatttaccaggaaaatggaaaccaaaaatratagggggaattggaggytttrtcaaagtaagacagtatgatcagatasycatagaaatctgcggacataaagctataggtacagtattagtaggacctacacctgycaacataattggaagaaatctgttgactcagcttgggtgcactttaaattttcccattagtcctattgaaactgtaccagtacaattaaagccaggaatggatggcccaaaagttaaacaatggccattaacagaagaaaagataaaagcattagtagaaatttgtacagaaatggaaaaggaagggaaaatttcaaaaattgggcctgaaaatccatacaatactccagtatttgctataaagaaaaaggacagtgctaaatggagaaaattagtagatttcagggaacttaataagagaactcaagacttctgggaagttcaattagggatacckcatcccgcagggttraaaaagaaaaaatcagtaacagtactagatgtaggtgatgcatatttttcagttcccttagatcaaaacttcagaaagtatactgcattcaccatacctagtataaacaatgagaygccagggattagatatcagtacaatgtgcttccacagggatggaaaggatcaccagcaatattccaaagtagcatgacaaaaatcttagagccttttagaaaacaaaatccagaratarttatctatcaatacgtggatgatttgtatgtaggatctgacttrgaaatagggcagcatagaacaaaaatagaggaactgagacaacatytgttgaagtggggatttaccacaccagacaagaagcatcagaaagaacctccattcctttggatggggtatgaactccatcctgataaatggacagtacagcctataatgctgccagaaaaagacagctggactgtcaatgacatacagaagttagtgggaaaattgaattgggcaagtcagatttatgcagga

SEQ ID NO: 65 - DNA, 1116 bp, Human Immunodeficiency Virus (HIV)
  CDS (1)...(297): HIV Protease
  CDS (298)...(1116): Portion of HIV Reverse Transcriptase
  VARIANT 208, 345: Xaa = Leu
  VARIANT 241: Xaa = Ile or Val
cctcagatcactctttggcaacgacccatcgtcacaataaagataggggggcagctaaaggaagctctattagatacaggagcagatgatacagtattagaagacatcaatttgccaggaaaatggaaaccaaaaatgatagggggaattggaggttttgtcaaagtaagagagtatgatcaggtacccatagacatctgtggacataaagttataggtacagtgttagtaggacctacacctgccaacataattggaagaaatctgttgactcagcttggttgcactttaaattttcccattagtcctattgaaactgtaccagtaaaattaaagccaggaatggatggcccaaaagttaaacaatggccattgacagaagaaaaaataaaagcattagtagaratctgtacagaattggaaaaggaaggaaaaatttcaaaaattgggcctgaaaayccatacaatactccagtatttgctataaagaaaaaagacagtactaaatggagaaaattagtagatttcagagaacttaataagagaactcaagacttctgggaagttcaattaggaataccacatcccgcagggttaaaaaagaaaaaatcagtaacagtactrgatgtgggtgatgcatatttttcagttcccttagataaagaattcaggaagtacactgcatttaccatacctagtataaacaatgagacaccagggrttagatatcagtacaatgtgcttccacagggatggaaaggatcaccagcaatattccaaagtagcatgacaaaaattttagagccttttagaaaacaaaatccagacataattatctatcaatacgtggatgatttgtatgtaggatctgatttggaaatagagcagcatagaacaaaaatagaggaactaagagaacatctgtggaagtggggattttacacaccagacaaaaaacatcagaaggaacctccattcctttggatgggttatgaactccatcctgataaatggacagtacagcctataaagytgccagaaaaagacagctggactgtcaatgacatacagaagttagtgggaaaattgaattgggcaagtcaaatttatccaggg

SEQ ID NO: 66 - DNA, 1116 bp, Human Immunodeficiency Virus (HIV)
  CDS (1)...(297): HIV Protease
  CDS (298)...(1116): Portion of HIV Reverse Transcriptase
  VARIANT 30: Xaa = Asp or Glu
  VARIANT 31: Xaa = Ala or Thr
  VARIANT 57: Xaa = Arg
  VARIANT 80: Xaa = Thr
  VARIANT 169, 318: Xaa = Arg or Lys
  VARIANT 202: Xaa = Asn or Lys
  VARIANT 207: Xaa = Ile or Val
  VARIANT 208: Xaa = Leu
  VARIANT 235: Xaa = Asn or Tyr
  VARIANT 245: Xaa = Asp, Cys, Gly or Tyr
  VARIANT 248: Xaa = Leu, Phe, Pro or Ser
  VARIANT 255: Xaa = Ser
  VARIANT 260: Xaa = Asn, Gln, His or Lys
  VARIANT 263: Xaa = Met or Thr
  VARIANT 312: Xaa = Gly
cctcagatcactctttggcaacgaccccttgtcacaataaagataggggggcaactaaaggaagctctattagatacaggagcagatgakrcagtattagaagaaatgaatttgccaggaagatggaaaccaaaaatgatagggggaattggaggttttatcaaagtaagrcartatgaccagatacccatagaaatctgtggacagaaagctataggtacagtattagtaggacctacmcctgtcaacataattggaagaaatctgttgactcaaattggttgcactttaaattttcccattagtcctattgaaactgtaccagtaaaattaaagccaggaatggatggcccaagagttaaacaatggccattgacagaagaaaaaataaaagcattagcagaaatttgtacagaaatggaaaaggaaggaaaaatttcaaaaattgggcctgaaaatccatacaatactccagtatttgccataaagaaaaaagacagtaataratggagaaaattagtagatttcagggaactcaataagagaactcaagacttctgggaagttcaattaggcataccacatcccgcagggttaaaaaagaamaaatcagtaacartactrgatgtgggtgatgcatatttttcagttcccttagataaagacttcaggaartatactgcatttaccatacctagtacawacaatgagacaccagggattagatatcagkrcaatgtgyytccacagggatggaaaggatcmccagcaatattcmamagtagcaygacaaaaattttagagccttttagaaaacaaaatccagacatagttatctgtcaatacgtggatgatttgtatgtaggatctgacttagaaatagggcagcatagaacaaaaatagaggaattgaggcaacatttgttgaggtggggrtttaccacaccagacaraaaacatcagaaagagcctccattcctttggatgggttatgaactccatcctgataaatggacagtacagcctataaaactgccagaaaaagayagctggactgtcaatgacatacagaagttagtgggaaaattgaattgggcaagtcagatttatgcaggg

SEQ ID NO: 67 - DNA, 1119 bp, Human Immunodeficiency Virus (HIV)
  CDS (1)...(297): HIV Protease
  CDS (298)...(1119): Portion of HIV Reverse Transcriptase
  VARIANT 54: Xaa = Ile
  VARIANT 176, 326: Xaa = Leu or Phe
  VARIANT 309: Xaa = Leu
  VARIANT 320: Xaa = His or Tyr
cctcaaatcactctttggcaacgaccaatagtcacaataaagataggggggcaactaaaggaagctctattagatacaggagcagatgatacagtactagaagaaatgaatttgccaggaagatggaaaccaaaaatgatagggggaattggaggttttatyaaagtaagacagtatgatcagatatccatagaaatctgtgggcataaagttacaggtacagtgttaataggacctacacctgtcaacataattggaagaaatctgttgactcagcttggttgcactttaaattttcccattagtcctattgaaactgtaccagtaaaattaaagccaggaatggatggcccaaaagttaaacaatggccattgacagaagaaaaaataaaagcattggtagaaatttgtgcagaaatggaaaaggaagggcaaatttcaaaaattgagcctgaaaatccatacaataatccagtatttgtcataaagaaaaaagacggtactaactggagaaaattaatagatytcagagaacttaataagagaactcaagatttctgggaaattcaattaggaataccacatcccgcagggttaaaaaagaataaatcagtaacagtactggatgtgggtgatgcattttattcagttcccttagatgagaacttcaggaagtatactgcatttaccatacctagtataaacaatgagacaccagggattagatatcagtacaatgtgcttccaatgggatggaaaggatcaccagcaatattccaaagtagcatgacaaaaattttagagccttttagaaaaaacaatccagacatagtcatctatcaatacatggatgatttgtatgtagcatctgatttagaaatagggcagcatagaacaaaaatagaggaactgagagaacatctattraagtggggatttaccacaccagacaaraaryatcagaaagaacctccaytcctttggatgggttatgaactccatcctgataaatggacagtacagcctatagtgctgccagaaaaagacagctggactgtcaatgacatacagaagttagtgggaaaattgaattgggcaagtcagatttatccagggatt

SEQ ID NO: 68 - DNA, 1119 bp, Human Immunodeficiency Virus (HIV)
  CDS (1)...(297): HIV Protease
  CDS (298)...(1119): Portion of HIV Reverse Transcriptase
  VARIANT 75: Xaa = Val
  VARIANT 278: Xaa = Ile or Val
cctcaaatcactctttggcaacgacccctcgtcacaataaagatagggggacaactaaaagaagctctattagatacaggagcagatgatacagtattagaagaaatgaatttgccagggaaatggaaaccaaaaatgatagggggaatcggaggatttatcaaagtaagacagtatgagcagatacacatagaaatctgtgggcataaagctataggtacagtrttaataggacccacacctgtcaacataattggaagaaatctgttgactcagattggctgcactttaaattttcccattagtcctattgaaactgtaccagtaaaattaaagccaggaatggatggcccaaaagttaaacaatggccattgacagaagagaaaataaaagcattagtagaaatttgtacagaaatggaaaaggaaggaaaaatttcaaaaattgggcctgaaaatccatacaatactccagtttttgccataaagaaaaaagacagtactaaatggagaaaattagtagatttcagagaacttaataaaagaactcaagacttctgggaagttcaattaggaataccacatcctgcagggttgaagaagaaaaaatcagtaacagtactagatgtgggtgatgcatatttttcagttcccttagataaaaactttaggaagtatactgcatttaccatacctagtataaataatgaaacaccagggattagatatcagtacaatgtgcttccacagggatggaaaggatcaccagcaatattccaagctagcatgacaaaaatcttagagccttttagaaaacaaaatccagacatgrttatttatcaatacatggatgatttgtatgtaggctctgacttagaaataggacagcatagaacaaaaatagaagaactgagacaacatctgttgaggtgggggtttaccacaccagacaaaaaacatcagaaagaacctccattcctctggatgggttatgaactccatcctgataaatggacagtacagcctatagtgctgccagaaaaggacagctggactgtcaatgacatacagaagttagtgggaaaattaaattgggcgagtcagatttatccagggatt

SEQ ID NO: 69 - DNA, 1119 bp, Human Immunodeficiency Virus (HIV)
  CDS (1)...(297): HIV Protease
  CDS (298)...(1119): Portion of HIV Reverse Transcriptase
  VARIANT 10, 19, 208, 345: Xaa = Leu
  VARIANT 23: Xaa = Ile or Leu
  VARIANT 73: Xaa = Gly or Ser
  VARIANT 157: Xaa = Thr
  VARIANT 158: Xaa = Pro
  VARIANT 309: Xaa = Leu or Trp
cctcagatcactctttggcaacgacccctygtcacaataaagataggggggcaaytaaaggaagctmtattagayacaggagcagatgatacagtgttagaagaaatgaatttgccaggaagatggaaaccaaaaataatagggggaattggaggttttatcaaagtaagagagtatgagcagatacaagtagaaatctgtggacataaggctatargtacagtattaataggacctacacctgtcaacataattggaagaaatctaatgactcagattggttgcactttaaattttcccattagtcctattgagactgtaccggtaaaattaaagccaggaatggatggtccaagagttaaacaatggccattgacagaagaaaaaataaaagcattagtagaaatttgtacagaattggaaaaggaaggaaaaatttcaaaaattgggcctgaaaatccatacaatacyccrgtatttgccataaagaaaaaagacagtactaaatggagaaaattagtagatttcagagaacttaataagagaactcaagacttctgggaagttcaattaggaataccgcatcccgcagggttaaagaagaaaaaatcagtaacagtactrgatgtgggtgatgcatatttttcagttcccttagataaagacttcaggaagtacactgcatttaccatacctagtataaacaatgagacaccaggaattagatatcagtacaatgtgcttccacagggatggaaaggatcaccagcaatattccaaagtagcatgacaaaaatcttagaaccttttagaaaacaaaatccagacatagttatctatcartacatggatgacttgtatgtaggatctgacttagaaatagggcagcatagaacaaaaatagaggaactaagacaacatctgtkgaggtggggattttacacaccagacaaaaaacatcagaaagaacctccattcctttggatgggttatgaactccaccctgataaatggacagtacagcctatagtgctrccagaaaaagacagctggactgtcaatgacatacagaagttagtgggaaaattaaattgggcgagtcagatttattcagggatt

SEQ ID NO: 70 - DNA, 1119 bp, Human Immunodeficiency Virus (HIV)
  CDS (1)...(297): HIV Protease
  CDS (298)...(1119): Portion of HIV Reverse Transcriptase
  VARIANT 10, 23: Xaa = Leu
  VARIANT 12: Xaa = Ala or Ser
  VARIANT 16, 144: Xaa = Gly
  VARIANT 19, 294: Xaa = Ile or Leu
  VARIANT 63: Xaa = Asn or Ser
  VARIANT 119: Xaa = Arg or Lys
  VARIANT 120: Xaa = Val
  VARIANT 161: Xaa = Ala
  VARIANT 196, 218: Xaa = Pro
  VARIANT 230, 315: Xaa = Thr
  VARIANT 272: Xaa = Glu or Lys
  VARIANT 299: Xaa = Ala or Thr
  VARIANT 371: Xaa = Ala or Gly
cctcaaatcactctttggcaacgacccctygtckcaataaaggtaggrgggcaamtaaaggaagctytattagatacaggagcagatgatacagtattagaagaaatgaatttgccaggaagatggaaaccaaaaatgatagggggaattggaggttttatcaaagtaaaacagtatgatcaggtaarcatagaaatctgtggacataaagctataggtacagtattaataggacctacacctgtcaacataattggaagaaayctgttgacacagattggttgyactttaaattttcccattagtcctattgaaactgtaccagtaaaattaaagccaggaatggatggcccaaragtyaaacaatggccattgacagaagaaaaaataaargcattaatggaaatttgtgcagayatggaaaaggaaggraaaatttcaaaaattgggcctgaaaatccatacaatactccagtatttgcyataaagaaaaaagacagcactaaatggagaaaattagtagatttcagagaacttaataagaaaactcaagacttttgggaagtccaattaggaataccacatccygcagggttaaaaaagaacaaatcagtaacagtattggatgtgggtgatgcatatttttcagttccyttagataaagacttcaggaaatayactgcatttacmatacctagtataaataatgcaacaccagggattagatatcagtacaatgtgcttccacagggatggaaaggatcaccagcaatattccaaagtagcatgacaaaaatcttagagccttttagararcagaatccagacatagttatctatcaatacatggatgayttgtatgtaggatctgacttagaamtagggcagcatagarcaaaaatagaggaactgagacaacatctgttaaggtgggggtttaccacwccagacaagaaacatcagaaagaacccccattcctttggatgggttatgaactccatcctgataaatggacagtacarcccatagtgttgccagaaaaagacagctggactgtcaatgacatacagaagttagtgggaaaattgaattgggcaagtcagatttaygsagggatt

SEQ ID NO: 71 - DNA, 1119 bp, Human Immunodeficiency Virus (HIV)
  CDS (1)...(297): HIV Protease
  CDS (298)...(1119): Portion of HIV Reverse Transcriptase
  VARIANT 143: Xaa = Ala or Glu
  VARIANT 366: Xaa = Ala
cctcaaatcactctttggcaacgacccatcgtctcaataaagatagggggggcaaataaagaagctctattagatacaggagcagatgatacagtattagaagaaatgaatttgccaggaagatggaagccaaaaatgatagtgggaattggaggttttagcaaagtaagacaatatgatcagatacccatagaaatctgcggacgtaaagttgtaggttcagtattaataggacctacacctgccaacataattggaagaaatctgttgactcagcttggctgtactttaaattttcccattagtcctattgaaactgtaccagtaaaattaaagccaggaatggatggcccaaaagttaaacaatggccattgacaaaagagaaaataaaagcattaatagaaatttgtacagaattggaagaagmaggaaaaattacaaaaattgggcctgaaaatccgtacaatactccaatatttgccataaagaaaaaraacagtactaaatggagaaaattagtagacttcagggaacttaataagagaactcaagacttctgggaagttcaattaggaataccacatcctgcagggttaaaaaagaaaaaatcagtaacagtactggatgtgggtgatgcatatttttcaattcccttagataaagacttcaggaartatactgcatttaccatacctagtacgaataatgagacaccagggattagatatcagtataatgtgcttccacagggatggaaaggatcaccagcaatattccaaagtagcatgacaaaaatcttagagccttttagaaaacaaaatcccgacatagttatctatcaatacgtggatgatttgcttgtaggatctgacttagaaatagagcagcatagaacaaaaatagaggagctaagacaacatctgtggaagtggggattttacacaccagacaaaaaacatcagaaagaacccccattcctttggatgggttatgaactccatcctgataaatggacagtacagcctatagtgctgccagaaaaagacagctggactgtcaatgacatacaaaagttagtgggaaaattaaattgggcwagtcagatttatccagggatt

SEQ ID NO: 72 - DNA, 1119 bp, Human Immunodeficiency Virus (HIV)
  CDS (1)...(297): HIV Protease
  CDS (298)...(1119): Portion of HIV Reverse Transcriptase
  VARIANT 10: Xaa = Leu
  VARIANT 54: Xaa = Ile or Val
  VARIANT 82: Xaa = Ala or Val
  VARIANT 257: Xaa = Ala
cctcagatcactctttggcaacgacccctygtcacaataaagatcggggggcaattaaaggaagctctattagatacaggagcagatgatacagtaatagaagaaatgaatttgccaggaagatggaaaccaaaaatgatagggggaattggaggttttrtcaaagtaagacaatatgatcaggtacccatagaaatttgcggacataaagctataggtacagtattaataggacctacacctgycaacataattggaagaaacctgttgactcaacttggctgcactttaaattttccaattagtcctattgaaactgtaccagtaaaattaaagccaggaatggatggcccaaaagttaaacaatggccattgacagaagaaaaaataaaagcattagtagaaatttgtacagaactggaaaaaggaaggaaaaattacaaaattgggcctgaaaacccatacaatactccagtatttgccataaagaaaaaagacagtactaaatggagaaaattagtagatttcagagaacttaataagagaactcaagacttctgggaagttcaattaggaataccacatcctgcagggttaaaaaagaaaaaatcagtaacagtactggatgtgggtgatgcatatttctcagttcccttagataaggacttcaggaagtatactgcatttaccatacctagcataaacaatgagacaccagggattagatatcagtacaatgtgctcccacagggatggaaaggatcaccagcmatattccaatgtagcatgacaaaaatcttagagccttttagaaaacaaaatccagaaatagttatctatcaatacatggatgatttgtatgtagggtctgacttagaaatagggcagcatagaacaaaaatagaggaactgagacgacatctgttgaagtggggattttacacaccagacaaaaaacatcagaaagaacccccattcctttggatgggttatgagctccatcctgataaatggacagtacaacctatagtgctaccagagaaagacagctggactgtcaatgacatacagaagttagtgggaaagttaaattgggcaagtcagatatacgcagggatt

SEQ ID NO: 73 - DNA, 1119 bp, Human Immunodeficiency Virus (HIV)
  CDS (1)...(297): HIV Protease
  CDS (298)...(1119): Portion of HIV Reverse Transcriptase
  VARIANT 62: Xaa = Ile or Val
  VARIANT 330: Xaa = Gly
cctcaaatcactctttggcaacgacccttcgtcacagtaaagataggggggcagctaaaggaagctctattagatacaggagcagataatacagtattagaagaaatgaatttaccgggaagatggaaaccaaaaatgatagggggaattggaggttttatcaaagtaagacagtatgatcagrtacccatagaaatctgtggacacaaagctataggtacagtattaataggacctacacctgtcaacataattggaagagatctgttgactcagcttggttgcactttaaattttcccattagtcctattgatactgtaccagtaaaattaaaaccaggaatggatggcccaaaagttaaacaatggccattgacagaagaaaaaataaaagcattagtagaaatttgtacagaactggaaaaggaagggaagatttcaaaaattgggcctgaaaatccatacaataccccagtatttgctataaagaaaaaagacagtactaaatggagaaagttagtagatttcagagaacttaataagagaactcaagacttctgggaagttcaattaggaataccacatcccgcggggttaaaaaagaacaaatcagtaacagtactggatgtgggtgatgcatatttttcagttcccttagataaagacttcaggaagtatactgcatttaccatacctagtataaacaatgagacaccagggattagatatcagtacaatgtgcttccccagggatggaaaggatcaccagcaatattccaaagtagcatgacaaaaattttagagccttttagaaaacagaatccagacatagttatctaccaatacgtggatgacttgtatgtaggatctgacttagaaatagggcagcatagagcaaaaatagatgagctgaggcaacatctgttgaagtggggattttacacaccagacaaaaagcatcagaaagaaccaccattcctttggatgggktatgaactccatcctgataaatggacagtacagcctatagtgctgccagaaaargacagctggactgtcaatgacatacagaagttagtgggaaaattgaattgggcaagtcagatttacccagggatt

SEQ ID NO: 74 - DNA, 1116 bp, Human Immunodeficiency Virus (HIV)
  CDS (1)...(297): HIV Protease
  CDS (298)...(1116): Portion of HIV Reverse Transcriptase
cctcagatcactctttggcaacgacccctcgtcacaataaaggtcggggggcaactaaaggaagctctattagatacaggagcagatgatacagtattagaggaactaaatttgccaggaagatggaaaccaaaaatgatagggggaattggaggttttatcaaagtaaaacagtatgatcagatacccatagaaatatgtggacataaagctattggtacagtattagtaggacctacacctgtcaacataattggaagaaacttgttgactcagcttggttgcactttaaattttcccattagtcctattgaaactgtaccagtaaaattaaagccaggaatggatggcccaaaagttaaacaatggccattgacagaagaaaaaataaaagcattaacagaaatttgtacagaaatggaaaaggaagggaaaatttcaaaaattgggcctgaaaatccatacaatactccagtatttgctataaagaaaaaagacagtactaaatggagaaaattagtagatttcagagaacttaataagagaactcaagacttctgggaagttcaattaggaataccacatcccgcaggtttaaaaaagaaaaaatcagtaacagtcctggatgtgggtgatgcatatttttcagttcccttagataaagaattcaggaagtacactgcatttaccatacctagtataaacaatgagacaccaggaattagataccagtacaatgtgcttccccaggggtggaaaggatcaccagcaatattccaaagtagcatgacaaaaatcttagagccttttaggaaacaaaatccagacatagttatctaccaatacatggatgatttgtatgtaggatctgacttagaaatagggcagcatagaacaaaaatagaggaactgagacagcatctgttgaggtggggatttaccacaccagacaaaaagcatcagaaagaacctccattcctttggatgggttatgagctccatcctgataaatggacagtacagcctatagtgctgccagaaaaggatagctggactgtcaatgacatacagaagttagtgggaaaattaaattgggcaagtcagatttatgcaggg

SEQ ID NO: 75 - DNA, 819 bp, Human Immunodeficiency Virus (HIV)
  CDS (1)...(819): Portion of HIV Reverse Transcriptase
  VARIANT 6: Xaa = Glu or Asp
  VARIANT 119: Xaa = Pro
  VARIANT 143, 206: Xaa = Arg
  VARIANT 207: Xaa = Arg, Gln, Glu, Gly or Lys
  VARIANT 215: Xaa = Thr
cccattagtcctattgamactgtaccagtaaaattaaagccaggaatggatggcccaaaagttaaacaatggccattaacagaggaaaaaataaaagcattggtagaaatttgtacagaaatggaaaaggaaggaaaaatttcaaaaattgggcctgaaaatccatacaatactccagtatttgccataaagaaaaaggacagtactaaatggagaaaattagtagatttcagagaacttaataaragaactcaagatttctgggaagttcaattaggaataccacatccctcagggttaaaaaagaayaaatcagtaacagtattggatgtgggtgatgcatatttttcagttccyttagataaagacttcaggaagtatactgcatttaccatacctagtataaacaatgagacaccagggattagrtatcagtacaatgtgcttccacaaggatggaaaggatcaccagcaatattccaaagtagcatgacaaaaatcttagagccttttagaaaacataatccagacatagttatctatcaatacgtggatgatttgtatgtaggatctgacttagaaatagaggagcatagaacaaaaatagaggaactgagrvrgcatctgttaaagtggggatttacyacaccagacaaaaagcatcagaaagaacctccatttctttggatgggttatgaactccatcctgataaatggacagtacagcctataaagctgccagaaaaagacagctggactgtcaatgacatacagaagttagtgggaaaattgaattgggcaagtcagatttatgcaggg

SEQ ID NO: 76 - DNA, 819 bp, Human Immunodeficiency Virus (HIV)
  CDS (1)...(819): Portion of HIV Reverse Transcriptase
  misc_feature 396: n = a, c, t or g
  VARIANT 21: Xaa = Val
  VARIANT 132: Xaa = Ile or Met
cccattagtcctattgaaactgtaccagtaaaattaaagccaggaatggatggcccaaaagtyaaacaatggccattaacagaagaaaaaataagagcattagtagaaatttgtacagaaatggaaaaggaaggaaaaatttcaaaaattgggcctgaaaatccatacaatactccagtgtttgctataaagaaaaaagacagtactaartggagaaaattggtagatttcagagaacttaataagagaactcaagacttctgggaagttcaattaggaataccacatccctcagggttaaaaaagaaaaaatcagtaacagtactggatgtgggtgatgcatatttttcagttcccttagataaagacttcaggaagtatactgcatttactatncctagtataaacaatgagacaccagggattaggtatcagtacaatgtgcttccacaaggatggaaaggatcaccagcaatattccaaagtagcatgacaaaaatcttagagccttttagaaaacaaaatccagacatagttatctatcaatacgtggatgatttgtatgtaggatctgacctagaaataggacagcatagaacaaaaatagaggaactgagacagcatctgttgaggtggggatttaccacaccagacaagaaacatcagaaagaacctccctttctttggatgggctatgaactccatcctgataaatggacagtacagcctatagagctgccagacaaggatagctggactgtcaatgacatacagaagttagtgggaaaattaaattgggcaagtcagatatatgcaggg

SEQ ID NO: 77 - DNA, 1116 bp, Human Immunodeficiency Virus (HIV)
  CDS (1)...(297): HIV Protease
  CDS (298)...(1116): Portion of HIV Reverse Transcriptase
  misc_feature 571, 572, 573, 574, 575, 576, 577, 578, 579, 580, 581, 582, 583, 584,585, 586, 587, 588, 589, 590, 591: n = a, c, t or g
  VARIANT 191, 192, 193, 194, 195, 196, 197: Xaa = Any Amino Acid
  VARIANT 198: Xaa = Leu or Stop codon
cctcagatcactctttggcaacgacccctcgtcacaataaagataggggggcaactaaaggaagctctattagatacaggagcagatgatacagtattagaagacatgaatttgccagggagatggaaaccaaaaatgatagggggaattggaggttttatcaaagtaagacagtatgatcagatacctatagaaatctgcggacataaagctgtaggtaaagtattagtaggacctacacctgtcaacataattggaagaaatctgttgactcaacttggttgcactttaaattttcctattagtcctattgaaactgtaccagtaaaattaaagccaggaatggatggcccaaaagttaagcaatggccattgacagaagaaaaaataaaagcattagtagaaatttgtacagaaatggagaaggaagggaaaatttcaaaaattgggcctgaaaatccatacaatactccagtatttgctataaagaaaaaaaacagtactagatggagaaaattagtagatttcagagaacttaataagagaacgcaagacttctgggaagttcaannnnnnnnnnnnnnnnnnnnngggtwaaaaaagaaaaaatcagtaacagtactggatgtaggtgatgcatatttctcagttcctctagataaagacttcagaaagtacactgcattcaccatacctagtataaacaatgagacaccagggattagatatcagtacaatgtgctgccacagggatggaaaggatcaccagcaatattccaaagtagcatgacaaaaatcttagagccttttagaaaacaaaatccagacatagttatctatcaatacgtggatgatttgtatgtgggatctgacttagaaatagggcagcatagaacaaaaatagaggaactgagacaacatttgttgaagtggggatttaccacaccagacaaaaaacatcagaaagaacctccattcctttggatgggttatgaactccatcctgataaatggacagtacagcctatagtgctgccagaaaaggacagctggactgtcaatgacatacagaagttagtgggaaaattgaattgggcaagccagatatatgcaggg

SEQ ID NO: 78 - DNA, 1122 bp, Human Immunodeficiency Virus (HIV)
  CDS (1)...(297): HIV Protease
  CDS (298)...(1122): Portion of HIV Reverse Transcriptase
  VARIANT 157: Xaa = Tyr
  VARIANT 163, 312: Xaa = Arg or Lys
  VARIANT 189: Xaa = Leu or Phe
  VARIANT 207: Xaa = Ala or Val
  VARIANT 209: Xaa = Ile or Val
  VARIANT 223: Xaa = Glu or Lys
  VARIANT 309: Xaa = His or Tyr
  VARIANT 310: Xaa = Leu
  VARIANT 314, 374: Xaa = Gly
cctcagatcactctttggcaacgacccctcgtcacaataaagataggggggcaactaaaggaagctctattagatacaggagcagatgatacagtattagaagacatggatttgccaggaagatggaaaccaaaaatgatagggggaattggaggttttatcaaagtaaaacagtatgatcagatacccatagaaatctgtggacataaagttataggtacagtattagtaggacctacacctgtcaacataattggaagaaatctgttgactcagcttggttgcactttaaattttcccattagtcctattgaaactgtaccagtaaaattaaagccaggaatggatggcccaagagttaaacaatggccattgacagaagaaaaaataaaagcattggtagaaatatgtacagaaatggaaaaggaagggaaaatttcaaaaattgggcctgaaaatccatacaatacrccagtatttgccataargaaaaaagaaagctctagctctaaatggagaaaattagtagatttcagagaacttaataaragaactcaagactttttkgaagttcaattaggaataccacatcccgcagggttaaagaagaaaaaatcagyaacartattggatgtgggtgatgcatatttttcagttcccttagatraagacttcaggaagtatactgcatttaccatacctagtataaacaatgagacaccagggattagatatcagtacaatgtgcttccacagggatggaaaggatcaccagctatattccaaagtagcatgacaaaaatcttagagccttttagaaaacaaaatccagayatagttatctatcaatacatggatgatttgtatgtaggatctgayttagaaatagagcagcatagaataaaaatagaggaactgagacaayatytgtggargtggggrttttacacaccagacaaaaaacatcagaaagaacctccattccattggatgggttatgaactccatcctgataaatggacagtacagcctatagtgctgccagaaaaagacagctggactgtcaatgacatacagaagttagtgggaaaattgaattgggcaagtcagatttatgcaggr

SEQ ID NO: 79 - DNA, 1116 bp, Human Immunodeficiency Virus (HIV)
  CDS (1)...(297): HIV Protease
  CDS (298)...(1116): Portion of HIV Reverse Transcriptase
  VARIANT 361: Xaa = Gly
cctcagatcactctttggcaacgacccctcgttacaataaaggtaggggggcaactaaaggaagctctattagatacaggagcagacaatacagtattcgaagacctggatttaccaggaaggtggaaaccaaaaatgatagggggaattggaggttttatcaaagtaaaacagtatgagcagatacccatagaaatctgtgggcgtaaagctataggtacagtgttagtaggacctacacctgtcaacataattggaagagatctgttgactcagattggttgcactctaaattttcccattagtcctattgaaactgtaccagtaaaattaaagccaggaatggatggcccaagagttaaacaatggccattgacagaagaaaaaataaaagcattaatagaaatttgtgcagaaatggaaaaggaagggaaaatttcaaaaattgggcctgaaaatccatacaatactccagtatttgccataaagaaaaagaacagtaataaatggagaaaattagtagatttcagagaacttaataagagaactcaagacttctgggaagttcaattaggaataccacatcccgcagggttaaaaaagaaaaagtcaataacagtattagatgtgggtgatgcatatttctcagttcccttagatgaagacttcaggaagtatactgcatttaccatacctagtacaaacaatgagacaccagggattagatatcagtacaatgtgctgccacagggatggaaaggatcaccagcaatattccaaagtagcatgacaaaaattttagagccttttagaaaacaaaatccagacatagttatctatcaatacatggatgatttgtatgtaggatctgatttagaaatagagcagcatagaacaaaaatagatgaactgagacaacatctgttgaggtggggacttaccacaccagaccagaaacatcagaaagaacctccattcctttggatgggttatgaactccatcctgataaatggacagtacagcctatagtgctgccagacaaagacagctggactgtcaatgacatacagaagttagtgggraaattgaattgggcaagtcaaatttacccaggg

SEQ ID NO: 80 - DNA, 1119 bp, Human Immunodeficiency Virus (HIV)
  CDS (1)...(297): HIV Protease
  CDS (298)...(1119): Portion of HIV Reverse Transcriptase
  VARIANT 91: Xaa = Thr
  VARIANT 159: Xaa = Ile or Val
cctcagatcactctttggcaacgacccctcgtcacaataaagataggggggcagctaaaggaggctctattagatacaggagcagatgatacagtattagaagaaatgaatttgccaggaagatggaaaccaaaaatgatagggggaattggaggttttatcaaagtaagacagtatgatcagatactcatagaaatttgtggacataaagctataggtacagtattagtaggacctacacctgtcaacataattggaagaaatctgttgacwcagattggttgcactttaaattttcccattagtcctattgaaactgtaccagtaaaattaaagccaggaatggatggcccaagagttaaacaatggccattgacagaagaaaaaataaaagcattagtagaaatttgtacagaaatggaaaargaagggaaaatttcaaaaattgggcctgaaaatccatacaatactccartatttgccataaagaaaaaagacagtactaaatggagaaaattagtagatttcagagaacttaataagaggactcaagatttctgggaagttcaattaggaataccacatcccgcagggttgaaaaagaaaaaatcagtaacagtactggatgtgggtgatgcatatttctcagttcccttagatgaagacttcagaaagtatactgcatttaccatacctagtataaacaatgagacaccagggattagatatcagtacaatgtgcttccacagggatggaaaggatcaccagcaatattccaaagtagcatgacaaaaatcttagagccttttagaaaacaaaatccagacatagtcatctatcaatacatggatgatttgtatgtaggatctgacttagaaatagggcagcataggacaaaaatagaggaactgagacaacatttgttgaagtgggggtttaccacaccagacaaaaaacatcagaaagaacctccattcctttggatgggttatgaactccatcctgataaatggacagtgcagcctatagtgttaccggaaaaagacagctggactgtcaatgacatacagaagttagtgggaaaattgaattgggcaagtcagatttacccagggatt

SEQ ID NO: 81 - DNA, 1116 bp, Human Immunodeficiency Virus (HIV)
  CDS (1)...(297): HIV Protease
  CDS (298)...(1116): Portion of HIV Reverse Transcriptase
  VARIANT 9, 63: Xaa = Pro
  VARIANT 12: Xaa = Ala or Thr
  VARIANT 20, 310: Xaa = Arg or Lys
  VARIANT 64: Xaa = Ile or Val
  VARIANT 75: Xaa = Val
  VARIANT 87: Xaa = Arg
  VARIANT 304: Xaa = Leu
cctcaaatcactctttggcaacgaccycttgttrccataaagataggggggcaactaarggaagctctattagatacaggagcagatgatacagtattagaagaaataaatttgccaggaagatggaaaccaaaaatgatagggggaattggaggttttatcaaagtaaaacagtatgatcaaataccyrtagaaatttgtggacatagagctataggtacagtwttagtaggacctacacctgtcaacataattggaagraatctgttgactcagattggttgcactttaaattttcccattagtcctattgaaactgtaccagtaaaattaaagccaggaatggatggcccaaaagttaaacaatggccattgacagaagaaaaaataaaagcattggtagaaatttgtacagaaatggaaaaggaaggaaaaatttcaagaattgggcctgaaaatccatacaatactccagtatttgctataaagaaaaargatagtactaaatggagaaaattagtagatttcagggaacttaataagaggactcaagacttctgggaagttcaattaggaataccacatcccgcagggttaaaaaagaaaaaatcagtaacagtactggatgtgggtgatgcatatttttcagttcccttagataaagaattcaggaagtatactgcatttactatacctagtacaaacaatgagacaccagggattagatatcaatacaatgtgcttccacaaggatggaaaggatcaccagcaatattccaaagtagcatgacaaaaatcttagagccatttagaaaacaaaatccagaaatagtcatctatcaatacgtggatgatttgtatgtaggatctgacttagaaataggacagcatagaacaaaaatagaggaaytaagagaacatctgttaargtggggatttaccacaccagacaaaaagcatcagaaagaacctccatttctttggatgggttatgaactccatcctgataaatggacagtacagcctatacagctgccagaaaaggaaagctggactgtcaatgacatacagaagttagtgggaaaattgaattgggcaagtcagatttatgcaggg

SEQ ID NO: 82 - DNA, 1116 bp, Human Immunodeficiency Virus (HIV)
  CDS (1)...(297): HIV Protease
  CDS (298)...(1116): Portion of HIV Reverse Transcriptase
  VARIANT 222: Xaa = Asp or Glu
  VARIANT 295: Xaa = Gly
  VARIANT 327, 363: Xaa = Leu
  VARIANT 353: Xaa = Val
cctcagatcactctttggcaacgacccctcgtcacagtaaagataggggggcaattaaaggaagctctattagatacaggagcagatgatacagtattagaagaaatgagtttaccaggaaaatggaaaccaaaaatgatagggggaattggaggttttatcaaagtaagacagtatgatcagatacttgtagaaatctgtggacataaagctataggtacagtattagtaggacctacacccgtcaacataattggaagaaatctgttgactcagattgggtgcactttaaattttcccattagtcctattgaaactgtaccagtaaaattaaagccaggaatggatggcccaaaagttaaacaatggccattgacagaagaaaaaataaaagcattagtagaaatttgtacagaaatggaaaaggaagggaaaatttcaaaaattgggcctgaaaatccatacaatactccagtatttgccataaaaaagaaagacagtactaaatggagaaagttagtagatttcagagaacttaayaaaaagactcaagacttctgggaagttcaattaggaataccacatcccgcagggttaaaaaagaaaaaatcagtaacagtactggatgtgggtgatgcatatttttcagttcccttagataaagamttcaggaartatactgcatttaccatacctagtgtaaacaatgagacaccagggattagatatcagtacaatgtgcttccacagggatggaaaggatcaccagcaatatttcaaagtagcatgacaaaaatcttagagccttttagaaaacaaaatccagacatagttatctaycagtacatggatgatttgtatgtaggatctgacttagaaataggraagcacagaacaaaaatagaggagctaagacagcatctgttgaagtggggatttaccacaccagacaaaaaacatcagaaagaacctccattcctktggatgggttatgaactccatcctgataaatggacagtacagcctataaaactgccagaaaaagacagctggactgtyaatgacatacagaagttagtgggaaaattraattgggccagtcagatttatgcaggg

SEQ ID NO: 83 - DNA, 1116 bp, Human Immunodeficiency Virus (HIV)
  CDS (1)...(297): HIV Protease
  CDS (298)...(1116): Portion of HIV Reverse Transcriptase
  VARIANT 344: Xaa = Glu or Val
cctcagatcactctttggcaacgaccactcgtcgcaataaagataggggggcaactaaaggaagctctattagatacaggagcagatgatacagtattagaagacatgagtttaccaggaaaatggaaaccaaaaatgatagggggaattggaggttttatcaaagtaagacagtatgatcaagtacccatagaaatctgtggacataaagctataggtacagtattagtaggacctacacctgtcaacataattggaagaaatctgttgactcagcttggttgcactttaaattttcccattagtcctattgaaactgtaccagtaaaattaaagccaggaatggatggcccaaaagttaaacaatggccattgacagaagaaaaaataaaagcattagtagaaatttgtacagaaatggaaaaggaaggaaaaatttcaaaaattgggcctgaaaatccatataatactccagtatttgccataaagaaaaaagacagtactaaatggaggaaattagtagattttagagaacttaataagagaactcaagatttctgggaagttcaattaggaataccacatccagcagggttaaaaaagaaaaagtcagtaacagtgctggatgtgggtgatgcatatttttcagttcccttagataaagaattcaggaagtatactgcatttaccatacccagtataaacaatgagacacccagggttagatatcaatacaatgtacttccacagggatggaaaggatcaccagcatatttccaaagtagcatgacaaaaatcttagaacccttcagaaaacaaaacccagacatagttatctatcaatacatggatgacttatatgtaggatctgacttagagataggacagcatagagcaaaaatagaggacctaagagcacatctgttgaagtgggggtttaccacaccagacaaaaaacatcagaaagaacccccatttctctggatgggttatgaactccatcctgataaatggacagtacagcctatagwgctaccagaaaaagacagctggactgtcaatgacatacagaaattagtaggaaaattaaattgggcaagtcagatttatccaggg

SEQ ID NO: 84 - DNA, 1116 bp, Human Immunodeficiency Virus (HIV)
  CDS (1)...(297): HIV Protease
  CDS (298)...(1116): Portion of HIV Reverse Transcriptase
  VARIANT 96: Xaa = Thr
  VARIANT 304: Xaa = Leu
  VARIANT 307: Xaa = His or Tyr
cctcaaatcactctttggcaacgacccattgtcacaataaaagtaggggggcaactaatggaagctctattagatacaggagcagatgatacagtattagaagacataaatttgccaggaagatggaaaccaaaaataatagggggaattggtggttttgtcaaagtgagacagtatgatcaggtacccatagaaatctgtggacataaagttataggtacagtattagtaggacctacacctaccaacgtagttggaagaaatctgatgactcagattggctgcacyttaaattttcctattagtcctattgaaactgtaccagtaaaattaaagccaggaatggatggcccaaaagttaaacaatggccattgacggaagaaaaaataaaagcattagtagaaatttgtacagaactggaaaaggatggaaaaatttcaaaaattgggcctgaaaatccatataatactccaatatttgccataaagaaaaagaacagtgataaatggagaaaattagtagatttcagagaacttaataaragaactcaagacttctgggaagttcaattaggaataccacatcctgcagggttaaaaaagaataaatcagtaacagtactggatataggtgatgcatatttttcaattcccttagataaagactttaggaagtatactgcattcaccatacctagtataaacaatgagacaccaggggttagatatcagtacaatgtgcttccacagggatggaagggatcaccagcaatattccaaagcagcatgaccaaaatcttagagccttttagaaaacagaatccagacatagttatctgccaatacgtggatgatttgtatgtaggatctgacttagaaatagggcagcatagaacaaaaatagaggaactraggaatyatctgtggaagtggggattttacacaccagacaaaaaatatcagaaagaacctccattcctttggatgggttatgaactccatcctgataaatggacagtacagcccatagtgctgccagaaaaagacagctggactgtcaatgacatacagaagttagtgggaaaattaaattgggcaagtcagatttatccaggg

SEQ ID NO: 85 - DNA, 1116 bp, Human Immunodeficiency Virus (HIV)
  CDS (1)...(297): HIV Protease
  CDS (298)...(1116): Portion of HIV Reverse Transcriptase
  VARIANT 144: Xaa = Gly
  VARIANT 182: Xaa = Arg or Lys
  VARIANT 202: Xaa = Asn or Lys
  VARIANT 213: Xaa = Ala
  VARIANT 218: Xaa = Pro
  VARIANT 238: Xaa = Ala or Thr
  VARIANT 273: Xaa = Gln or Lys
  VARIANT 278, 353: Xaa = Val
  VARIANT 286: Xaa = Leu
  VARIANT 344: Xaa = Leu or Met
cctcaaatcactctttggcaacgacccctcgtcacaataaaagtaggggggcaactaaaggaagctctattagatacaggagcagatgatacagtattagaagaaatgaatttgccagggagatggaaaccaaaaatgatagggggaattggaggttttatcaaagtaagacagtatgatcaggtaagcatagaaatctgtggacataaagctataggtacagtattaataggacccacccctgtcaacataattggaagaaatctgttgactcagcttggttgcactttaaattttcccattagtcctattgaaactgtaccagtaaaattaaagccaggaatggatggcccaagagttaaacaatggccattgacagaagaaaaaataaaagcattagtagaaatttgtacagaaatggagaaggaaggraaaatttcaaaaattgggcctgaaaatccatacaatactccagtatttgccataaaraaaaaagacagtactaaatggagaaagttagtagatttcagagaacttaataaaaraactcaagacttctgggaagttcaattaggaataccacatcccgcagggttaaaaaagaamaaatcagtaacagtactggaygtgggtgatgcrtatttttcagttccyttagayaaagayttcaggaagtacacagcatttaccatacctagtgtaaacaatgagrcaccagggattagatatcagtacaatgtgcttccacarggatggaaaggatcaccagcaatattccaaagtagcatgacaaaaatcttagagccttttagaaarmaaaatccagacatagtyatctaycaatacatggatgatttrtatgtaggatctgacttagaaataggacagcatagaacaaaaatagaggaactgagacaacatctgttgcagtgggggttaaccacaccagacaaaaaacatcagaaagaacctccattcctttggatggggtatgaactccatccggataaatggacagtacagcctatawtgctgccagacaaagacagctggactgtmaatgacatacagaarttagtaggaaaattgaattgggcgagtcagatctacccaggg

SEQ ID NO: 86 - DNA, 1116 bp, Human Immunodeficiency Virus (HIV)
  CDS (1)...(297): HIV Protease
  CDS (298)...(1116): Portion of HIV Reverse Transcriptase
cctcaaatcactctttggcaacgacccatcgtcacagtaaagataggggggcacacaacggaagctctattagatacaggagcagatgatacagtattagaagaaatgaatttgccagggagatggaaaccaaaaatgataggaggaattggaggttttatcaaagtaagacagtatgagcaggtacccatagaattctgtggacataaaactgtaggtacagtattaataggacctacacctgtcaacataattggaagaaatctgatgactcagattggttgtactttaaattttcccattagtcctattgaaactgtaccagtaaaattaaagccaggaatggatgggcccaaagttaaaccatggccattgacagaaagaaaaaataaagcattagtagaaatttgttccgaaatggaaaaaggaaggaaaatttcaaaaattgggcctgagaatccatacaatactccagtatttgccataaagaaaaagaacagtactagatggagaaaattagtagatttcagagaacttaataaaagaactcaagacttctgggaagttcagttaggaataccacatcccgcagggttaaaaaagaacaaatcagtaacagtactggatgtaggtgatgcatatttttcagttcccttagatgaagaattcaggaagtatactgcattcaccatacctagtacaaacaatgaaacaccagggattagatatcagtacaatgtgcttccacagggatggaaaggatcaccagcaatattccaatgtagcatgacaaaaatcttagagccctttagaaaacaaaatccagaaatagttatctgtcagtacatggatgacttgtatgtagcatctgatttagaaatagggcagcatagaacaaaagtagaggaactgagacaacatctgttgaagtgggggtttttcacaccagacgaaaaacatcagaaagaacctccattcctttggatgggttatgaactccatcctgataaatggacagtacagcctatagtactgccagaccaagacagctggactgtcaatgatatacagaagttagtgggaaaattaaattgggcaagtcaaatttacccaggg

SEQ ID NO: 87 - DNA, 1116 bp, Human Immunodeficiency Virus (HIV)
  CDS (1)...(297): HIV Protease
  CDS (298)...(1116): Portion of HIV Reverse Transcriptase
  VARIANT 87: Xaa = Arg
  VARIANT 196: Xaa = Pro
  VARIANT 286: Xaa = Leu
cctcagatcactctttggcaacgacccctcgtcacaataaagatagaggggcaactaaaggaagctctattagatacaggagcagatgatacagtattagaagaaatgaatttgtcaggaagatggaaaccaaaaatgatagggggaattggaggttttatcaaagtaagacagtatgatcagatacccatagagatctgtggacataaagctgtaggtacagtattagtaggacctacacctgtcaacataattggaagraatctgttgactcagattggttgcaccttaaattttcccattagtcctattgaaactgtaccagtaaaattaaagccaggaatggatggcccaaaagttaaacaatggccattgacagaagaaaaaataaaagcattagtagaaatttgtacagaaatggaaaaggaagggaaaatttcaaaaattgggcctgaaaatccatacaatactccaatatttgccataaagaaaaaagacagtactaaatggagaaaattagtagatttyagagaacttaataagagaactcaagacttctgggaagttcaattaggaataccacatccygcagggttgaaraagaaaaaatcagtaacagtactggatgtgggtgatgcatatttctcagttcccttagatgaagayttcagaaagtatactgcatttaccatacctagtataaacaatgagacaccaggggttagatatcartacaatgtgcttccacagggatggaagggatcaccagcaatattccaaagcagcatgacaaaaatcttagagccttttaggaaacaaaatccagatatagttatctatcaatacatggatgacttrtatgtaggatctgacttagaaatagggcarcatagaacaaaaatagaggaattgagacaacatctgttgaagtggggattaaccacaccagacaaaaaacatcagaaagaacctccattcctttggatgggttatgaactccatcctgataaatggacagtacagcctatagtgctgccagaaaaagacagctggactgtcaatgatatacagaagttagtgggaaaattaaattgggcaagtcagatttatgcaggg

SEQ ID NO: 88 - DNA, 1116 bp, Human Immunodeficiency Virus (HIV)
  CDS (1)...(297): HIV Protease
  CDS (298)...(1116): Portion of HIV Reverse Transcriptase
  VARIANT 21: Xaa = Glu or Lys
  VARIANT 134: Xaa = Ile or Met
  VARIANT 138: Xaa = Ala or Glu
  VARIANT 280: Xaa = Phe or Tyr
  VARIANT 281: Xaa = Gln or His
cctcagatcactctttggcaacgacccatcgtcacaataaagataggggggcaactaaggraagctctattagatacaggagcagatgatacagtattagaagacatagaattgccaggaagatggaaaccaaaaatgatagggggaattggaggttttgtcaaagtaagacaatatgatcagatacccatagaaatctgtggacataaagttataggtacagtattagtaggacctacacctgccaacataattggaagaaatctgatgactcagcttggttgcactttaaattttcccattagtcctattgaaactgtaccagtaaaattaaagccaggaatggatggcccaaaagttaaacaatggccattgacaaaagaaaaaatagaagcattaatrgaaatttgtgmatttttggaaaaggaaggaaaaatttcaaaaattgggcctgaaaatccgtacaacactccagtatttgccataaagaaaaaaggaggtactaaatggagaaaaatagtagatttcagagaacttaataaaagaactcaagacttctgggaagttcaattaggaataccacatcccgcggggttaaaaaagaayaaatcagtaacagtactggatgtgggtgatgcatatttttcaattcccttagatgaagaactcaggaagtatactgcatttactatacctagtacaaacaatgagacaccagggattagataccaatacaatgtgcttccacagggatggaaaggatcaccagcaatatttcaaagtagcatgacaaaaatcttagagccctttagaaagcaaaatccagacatagttatctwtcawtacgtggatgatttgtatgtaggatctgacttagaaatagggaagcatagggaaaaaatagaggaactgagacaacatctgtggaagtggggattttacacaccagacgaaaaacatcagaaagaacctccattcctttggatgggttatgaactccatcttgataaatggacagtacagcctatagtgctgccagaaaaagacagctggactgtcaatgacatacagaagttagtgggaaaattaaattgggcaagtcagatttatgcaggg

SEQ ID NO: 89 - DNA, 1116 bp, Human Immunodeficiency Virus (HIV)
  CDS (1)...(297): HIV Protease
  CDS (298)...(1116): Portion of HIV Reverse Transcriptase
cctcagatcactctttggcaacgacccctcgtcacaataaagataggggggcaactaaaggaagctctattagatacaggagcagatgatacagtattagaagaaatgagtttgccagggagatggaaaccaaaaatgatagggggaattggaggttttatcaaagtaagacaatttgatcagatacccatagaaatatgtggacacaaagctataggtacagtattaataggacctacacctgtcaacataattggaaggaatctgttgactcagcttggttgcactttaaattttcccatcagtcctattgaacctgtaccagtaaaattaaagccaggaatggatggcccaaaagttaaacaatggccattgacagaagaaaaaataaaagcattagtagaaatttgtacagaactggaaaaagaagggaaaatttcaaaaattgggcctgaaaatccatacaatactccaatatttgccataaagaaaaaagacagtactaaatggagaaaattagtagatttcagagaactgaataagaaaactcaagacttctgggaagttcaattaggaataccacatcccgcagggttaaaaaagaaaaaatcagtaacggtactggatgtgggtgatgcatatttttcagttcccttagataaagacttcaggaaatatactgcatttaccatacctagtacaaacaatgagacaccagggattagatatcagtacaatgtgcttccacagggatggaaaggatcaccagcaatatttcaacatagcatgacaaaaatcttagagccttttagaaaacagaatccagacatagttatctatcaatacgtggatgacttgtatgtaggatctgacttagaaatagggcagcatagaacaaaaatagaggaactgagagaacatctgttgaagtggggattttacacaccagacaaaaaacatcagaaagaacctccattcctttggatgggttatgaactccatcctgataaatggacagtacagcctatagtgctgccagaaaaagacagctggactgtcaatgatatacagaagttagtgggaaaattgaattgggcaagtcagatttatgcaggg

SEQ ID NO: 90 - DNA, 1116 bp, Human Immunodeficiency Virus (HIV)
  CDS (1)...(297): HIV Protease
  CDS (298)...(1116): Portion of HIV Reverse Transcriptase
  VARIANT 10: Xaa = Ile
  VARIANT 23, 140, 363: Xaa = Leu
  VARIANT 273: Xaa = Gln or Lys
  VARIANT 288: Xaa = Val
cctcagatcactctttggcaacgacccatygtcacaataaaagtagggggacagctaaaggaagctytattagatacaggagcagatgatacagtattagaagaaatgaacttgccaggaaaatggaaaccaaaaataatagggggaattggaggttttgtcagagtaagacaatatgatcaggtacctgtagaaatttgtggacataaagctataggttcagtattagtaggaccaacacctgccaacataattggaagaaatctgatgactcagcttggtttcactttaaattttcccattagtcctattgaaactgtaccagtaaaattaaagccaggaatggatggcccaaaagttaaacaatggccattgacagaagaaaaaataaaagcattagtagaratttgtacagaaytggaaaaagaaggaaagatttcaaaaattgggcctgaaaatccatacaatactccagtatttgccataaagaaaaagaacagtgatagatggagaaaattagtagatttcagagaacttaataagagaactcaagacttctgggaagttcaattaggaataccacatcctggagggttaaaaaagaaaaaatcagtaacagtactagatgtgggtgatgcatatttctcagttcccttagatgaagacttcaggaagtatactgcatttaccatacctagtataaacaatgagacaccagggattagatatcartacaatgtgcttccacagggatggaaaggatcaccagcaatattycaaagtagcatgacaaaaatcttagagccttttaggaagmaaaatccagacatagttatcattcaatacatggatgatttgtatgtrggatctgatttagaaatagarcagcayagaacaaaaatagaggaactgagagatcatttattgaggtgggggtttttcacaccagaacaaaaacatcagaaagaacctccattccattggatgggttatgaactccatcctgataaatggacagtacatcctatagtgctgccagaaaaagacagctggactgtcaatgacatacagaagttagtgggaaaattraattgggcaagtcagatttatgcaggg

SEQ ID NO: 91 - DNA, 1115 bp, Human Immunodeficiency Virus (HIV)
  CDS (1)...(297): HIV Protease
  CDS (298)...(1115): Portion of HIV Reverse Transcriptase
  VARIANT 73: Xaa = Gly or Ser
  VARIANT 105: Xaa = Glu or Lys
cctcagatcactctttggcaacgaccccttgtcacagtaaagataggggggcaactaatagaagctctattagatacaggagcagatgatacagtattggaagaaatgaatttgccagggagatggaaaccaaaaataatagggggaattggaggttttatcaaagtaagacagtatgatcagatacccatagaaatctgtggacataaagttatargtccagtattaataggacctacacctgtcaacataattggaagaaatttgatgactcagattggctgcactttaaattttcccatcagtcctattraaactgtaccagtaaaattaaagccaggaatggatggcccaaaggttaaacaatggccattgacagaagaaaaaataaaagcattagtagaaatttgtacagaaatggaaaaggaaggaaaaatctcaaaaattgggcctgaaaacccatacaatactccagtatttgccataaagaaaaaaaacagtactagatggagaaaattagtagatttcagagaacttaataagagaactcaagacttctgggaagttcaattaggaataccacatcctggagggttaaaaaagaaaaaatcagtaacagtactggatgtgggtgatgcatatttttcagttcctctagatgaagacttcaggaagtatactgcatttaccatacctagtataaataatgagacaccaggggttagatatcagtacaatgtgcttccacagggatggaaaggatcgccagcaatatttcaggctagcatgacaaaaatcttagagccgtttagaaaacaaaatccagacatagttatctatcaatacgtggatgatttgtatgtaggatctgacctagaaatagggcagcatagaacaaaaatagaggaactgagacaacatttgttgaaatggggatttatcacaccagatgaaaaacatcagaaagaacctccattcctttggatggggtatgaactccatcctgataagtggacagtacagcctatagtactgccagaaaaagacagctggactgtcaatgacatacagaaattagtgggaaaattgaattgggcaagtcagatttatgcagg

SEQ ID NO: 92 - DNA, 1116 bp, Human Immunodeficiency Virus (HIV)
  CDS (1)...(297): HIV Protease
  CDS (298)...(1116): Portion of HIV Reverse Transcriptase
cctcagatcactctttggcaacgacccctcgtcacaataaagataggggggcagctaaaggaagctctattagatacaggagcagatgatacagtattagaagacataaacttgccaggaaaatggaaaccaaaaatgatagggggaattggaggttttatcaaagtaagacagtatgagcaggtacccatagaaatctgtggacataaaactataggtacagtattagtaggacctacacctgtcaacataattggaagaaatctgatgactcagattgggtgcactttaaattttcccattagtcctattgaaactgtaccagtaaaattaaagccaggaatggatggcccaaaagttaaacaatggccattgacagaagaaaaaataaaagcattagtagaaatttgtacagaaatggaaaaggaagggaaaatttcaaaaattgggcctgaaaatccatacaatactccagtatttgccataaagaaaaagaacagtactagatggagaaaagtagtagatttcagagaacttaataagaaaactcaagacttctgggaagttcaattaggaataccacatcccgcagggttaaaaaagaacaaatcagtaacagtactggatgtgggtgatgcatatttttcagttcccttagatgaagacttcaggaagtatactgcatttaccatacctagtataaacaatgagacgccagggattagatatcagtacaatgtgcttccacagggatggaaaggatcaccagcaatattccaaagtagcatgacaaaaatattagagccttttagaaaacaaaatccagacctggttatctgtcaatacatggatgatttatatgtaggatctgacctagaaatagggcagcatagaacaaaaatagaagaactgaggcaacatctgttgaagtggggatttaccacaccagacgaaaaacatcagaaagaacctccattcctttggatgggttatgaactccatcctgataaatggacagtacagcccatagtgctgccagacaaagacagctggactgtcaatgacatacagaagttagtgggaaaattgaattgggcaagtcagatttatgcaggg

SEQ ID NO: 93 - DNA, 1116 bp, Human Immunodeficiency Virus (HIV)
  CDS (1)...(297): HIV Protease
  CDS (298)...(1116): Portion of HIV Reverse Transcriptase
  VARIANT 119: Xaa = Arg or Lys
  VARIANT 143: Xaa = Asp or Glu
  VARIANT 200: Xaa = Gln or Lys
  VARIANT 208: Xaa = Leu
  VARIANT 266: Xaa = Ile
  VARIANT 278: Xaa = Ile or Val
  VARIANT 320: Xaa = His or Tyr
cctcagatcactctttggcaacgacccatcgtcacaataaagataggagggcagctaaaggaagctctaatagatacaggagcagatgatacagtattagaagaaatgaatttaccaggaagatggacaccaaaaataatagggggaattggaggttttgtcagagtaagacagtatgaacagatacccgtagaaatctgcgggcataaagctgtaggtacagtattagtaggacctacacctgccaacataattggaagaaatctgttgactcagattggctgtactttaaattttcccattagtcctattgatactgtaccagtaaaattaaagccaggaatggatggcccaaragttaaacaatggccattgacagaagagaaaataaaagcattagtagaaatttgtacagaactggaaaaggamggaaaaatttcaaaaattgggcctgaaaatccatacaatactccagtatttgctataaagaaaaaagacagtactaaatggagaaaagtagtagatttcagagaacttaataaaagaactcaagacttctgggaagttcaattaggaataccacatcctgcagggatamaaaagaacaaatcagtaacagtaytggatgtgggtgatgcatatttttcagttcccttagatgaggacttcaggaagtacactgcatttaccatacctagtacaaacaatgagacaccagggattagatatcagtacaatgtacttccacagggatggaaaggatcaccagcaatattccaaagtagcatgacaaaaatyttagagccttttagaaagaaaaatccagacatarttatctgccaatacatggatgatttgtatgtaggatctgacttagaaatagagcagcatagaacaaaaatagatgaactgagagaccatctgtggaagtggggattttacacaccagacaacaaayatcagaaagaacctccattccgttggatgggctatgaactccatcctgataaatggacagtacagcctatagtgctgccagaaaaggatagctggactgtcaatgacatacagaagttagtgggaaaattgaattgggcaagtcagaattatgcagga

SEQ ID NO: 94 - DNA, 1116 bp, Human Immunodeficiency Virus (HIV)
  CDS (1)...(297): HIV Protease
  CDS (298)...(1116): Portion of HIV Reverse Transcriptase
  VARIANT 367: Xaa = Ser
cctcagatcactctttggcaacgacccctcgtcacaataaagataggggggcaactaatagaggctctattggatacaggagcagatgatacagtattagaagaaatggatttgccaggaagatggaaaccaaaaataatagggggaattggaggttggatcaaagtaagacaatatgatcagatacccatagaaatttgtggacataaagttataagtacagtattagtaggacctacaccagtcaacgtaattggaagaaatctgatgactcagattggttgcactttaaattttcccattagtcctattgaaactgtaccagtaaaattaaagccaggaatggatggcccaagagttaaacaatggccattgacagaagaaaagataaaagcattagtagaaatttgtacagaattggaaaaggatgggaaaatttcaaaaattgggcctgaaaatccatacaatactccagtatttgccataaagaaaaaagacagtactaaatggagaaaagtagtagatttcagagaacttaataagagaactcaagacttctgggaagttcaattagggataccacatcccgcagggttaccaaagaaaaaatcagtaacagtactggatgtgggtgatgcatatttttcagttcccttagatgaagacttcaggaaatatactgcatttaccatacctagtataaataatgagacaccaggagttagatatcagtacaatgtgctcccacaggggtggaaaggatcaccagcaatattccaaagtagcatgaccaaaatcttagagccttttagaaaacagaatccaaacatacttatttgtcaatacatggatgatttgtatgtaggatctgacttagaaatagaacagcatagaacaaaaatagaggaactgagacaacatctgtggagatgggggttttacacaccagataaaaaacatcagaaggaacctccattcctttggatgggttatgaactccatcctgataaatggacagtacagcctatagagctgccagaaaaagacagctggactgtcaatgatatacagaagttagtgggaaaattgaattgggcaagycagatttatgcaggg

SEQ ID NO: 95 - DNA, 1116 bp, Human Immunodeficiency Virus (HIV)
  CDS (1)...(297): HIV Protease
  CDS (298)...(1116): Portion of HIV Reverse Transcriptase
  VARIANT 68: Xaa = Gly
  VARIANT 77: Xaa = Ile or Val
  VARIANT 314: Xaa = Asn, Ser, Thr or Tyr
cctcagatcactctttggcaacgacccctcgtcacaataaagataggggggcaactaaaggaagctctattagatacaggagcagatgatacagtattagaagaaatgaatttgccaggaaggtggaaaccaaaaatgatagggggaattggaggttttatcaaagtaagacagtatgatcagatatccgtagaaatctgtggrcataaagctataggtacagtattartaggacctacacctgtcaacataattggaaggaatttgttgactcagattggttgcactttaaattttcccattagtcctattgaaactgtaccagtaaaattaaagccaggaatggatggcccaaaagttaaacaatggccattgacagaagaaaaaataaaagcattagtagaaatttgtacagaaatggaaaaggaaggaaaaatttcaaaaattgggcctgaaaatccatacaatactccagtatttgccataaagaaaaaagacagtactaaatggagaaaattagtagatttcagagaacttaataagaaaactcaagacttttgggargttcaattaggaataccacatcccgcagggttaaaaaagaaaaaatcagtaacagtactggatgtgggtgatgcatatttttcagttcccttagataaagacttcaggaagtacactgcatttactatacctagtataaacaatgagacaccagggattagatatcaatacaatgtgcttccacagggatggaaaggatcaccagcaatattccagtgtagcatgacaaaaatcttagagccttttagaaaacaaaatccagaratagttatctatcaatacatggatgatctgtatgtaggatctgacttagaaatagaacagcatagaataaaaatagaggaactgagacaccatctgttgaaatggggatttwmcacaccagacaaaaaacatcagaaagaacctccattcctttggatgggttatgaactccatcctgataaatggacagtacagcctatagtgctgccagaaaargacagctggactgtcaatgacatacagaagttagtgggaaaattaaattgggcaagtcagatttacccaggg

SEQ ID NO: 96 - DNA, 1116 bp, Human Immunodeficiency Virus (HIV)
  CDS (1)...(297): HIV Protease
  CDS (298)...(1116): Portion of HIV Reverse Transcriptase
  VARIANT 16, 114, 192: Xaa = Gly
  VARIANT 58: Xaa = Gln or Glu
  VARIANT 110: Xaa = Arg or Lys
  VARIANT 205: Xaa = Val
  VARIANT 369: Xaa = Ile
cctcaaatcactctttggcaacgacccaatgtcacagtaaagataggrgggcaactaagggaagctctattagatacaggagcagatgatacagtattagaagaaataaatttgccaggaagatggaaaccaaaaatgatagggggaattgggggttttatcaaagtaagasagtatgatcaggtacccgtagaaatctgtggacataaagctataggtacagtattagtaggacccacacctgtcaacataattggaagaaatctgttgactcagattggttgcactttaaattttcccattagtcctattgaaactgtaccagtaarattaaagccaggratggatggcccaaaagttaaacaatggccattgacagaagaaaaaataaaagcattagtagaaatctgtacagaaatggaaaaggaagggaaaatttcaaaaattgggcctgaaaatccatacaatactccaatatttgccataaagaaaaaagacggtactaaatggagaaaagtagtagatttcagggaactcaataagagaactcaagacttctgggaagttcaattaggmataccacatcccgcagggttgaaaaagaaaaaatcagtracagtactggatgtgggtgatgcatatttttcagttcccttagatgaagaattcaggaagtatactgcatttaccatacctagtgtaaacaatgagacaccagggatcagatatcaatacaatgtgcttccacagggatggaagggatcaccagcaatatttcaaagtagcatgacaaaaatcttagagccttttagaaaacaaaatccagacatagtcatctatcaatacgtggatgatttgtatgtaggatctgacttagaaatagggcagcatagaacaaaaatagaggaactgagacaacatctgttgaagtggggatttaccacaccagacaaaaaacatcagaaagagcctccattcctttggatgggttatgaactccatcctgataaatggacagtacagcgtatagagctgccagaaaaggagagctggactgtcaatgacatacagaagttagtgggaaaattgaattgggcaagtcaaatwtacccaggg

SEQ ID NO: 97 - DNA, 1116 bp, Human Immunodeficiency Virus (HIV)
  CDS (1)...(297): HIV Protease
  CDS (298)...(1116): Portion of HIV Reverse Transcriptase
  VARIANT 22: Xaa = Ala
  VARIANT 197: Xaa = Ala or Gly
  VARIANT 280: Xaa = Cys or Tyr
cctcaaatcactctttggcaacgacccctcgtcaaaataaagataggggggcaaataaaggaagcyttattagatacaggagcagatgatacagtgttagaagaaatgaatttgccaggaaaatggaaaccaaaattgatagggggaattggaggttttatcaaagtaagacagtatgatcagatacttatagaaatctgtggccataaagctataggtacagtattagtaggacctacacctgccaacataattggaagaaatctgttgactcagattggttgcactttaaattttcccattagtcctattgaaactgtaccagtaaaattaaagccaggaatggatggcccaaaagttaaacaatggccattgacagaagaaaaaataaaagcattactagaaatttgtacagaactggaaaaggaagggaaaatttcaaaaattgggcctgaaaatccatacaatactccagtatttgccataaagaaaaaagacagtactaaatggagaaaattagtagatttcagagaacttaataagagaactcaagacttttgggaggttcaactaggaataccacatcccgsagggttaagaaagaaaaaatcagtaacagtactggatgtgggtgatgcatatttttcagttcccttatatgaggacttyaggaaatatactgcatttactatacctagtacaaacaatgagacaccagggattaggtatcagtacaatgtgcttccacagggatggaaaggatcaccagcaatattccaaagtagcatgacaaaaatcttagagccttttagaaaacaaaatccagacatagttatctrtcaatacgtggatgatttgtatgtaggatctgacttagaaatagggcagcatagaacaaaaatagaggaactgagacaacatctgtggcagtggggatttttcacaccagacaaaaaacatcagaaagaacctccattcctttggatgggttatgaactccatcctgataaatggacagtacagcctatagtactgccagaaaaagacagctggactgtcaatgacatacagaagttagtgggaaaattgaattgggcaagtcagatttacccaggg

SEQ ID NO: 98 - DNA, 1115 bp, Human Immunodeficiency Virus (HIV)
  CDS (1)...(297): HIV Protease
  CDS (298)...(1115): Portion of HIV Reverse Transcriptase
  VARIANT 66: Xaa = Ile
  VARIANT 312: Xaa = Gly
  VARIANT 315: Xaa = Thr
cctcaaatcactctttggcaacgacccgtcgtcacaataaagataggggggcaactaaaggaagctctattagatacaggagcagatgatacagtattagaagaaatgcatttgccaggaaaatggaaaccaaaaatgatagggggaattggaggttttatcaaagtaagacagtatgatcagatacctgtagaaatytgtggacataaagctataggtacagtattagtaggacctacacctgtcaacataattggaagaaatctgttgactcagattggttgcactttaaattttcccattagtcctattgaaactgtaccagtaaaattaaagccagggatggatggcccaaaagttaaacaatggccattgacagaagaaaaaataaaagcattagtagaaatatgtacagaaatggaaaaggaagggaaaatttcaaaaattgggccagaaaatccatacaatactccagtatttgccataaagaaaaaagacagtactaaatggagaaaattagtagatttcagagaacttaataagagaactcaagacttctgggaagttcaattgggaataccacatcccgcaggattaaaaaagaaaaaatcagtaacagtactggatgtgggtgatgcatatttttcagttcccttagataaagacttcaggaagtacactgcatttaccatacctagtataaacaatgagacaccagggattagatatcagtataatgtgcttccacagggatggaaaggatcaccagcaatattccaaagtagcatgacaaaaatcttagagccttttagaaaacaaaatccagayatagttatttatcaatacatggatgatttgtatgtaggatccgacctagaaatagggcagcatagaacaaaaatagaggaactgagacaacacctgttgaagtggggrtttaccackccagacaaaaaacatcagaaggaacctccattcctttggatgggttatgaactccatcctgataaatggacagtacagcctatagtactgccagaaaaagatagctggactgtcaatgacatacagaagttagtgggaaaattgaattgggcaagtcagatttactcagt

SEQ ID NO: 99 - DNA, 1115 bp, Human Immunodeficiency Virus (HIV)
  CDS (1)...(297): HIV Protease
  CDS (298)...(1115): Portion of HIV Reverse Transcriptase
  VARIANT 23: Xaa = Leu
  VARIANT 41: Xaa = Arg
  VARIANT 200: Xaa = Glu or Lys
  VARIANT 283: Xaa = Leu, Met or Val
  VARIANT 287: Xaa = Tyr or Stop codon
  VARIANT 289: Xaa = Gly or Ser
cctcagatcactctttggcagcgacccctcgtcacaataaagataggggggcaactaaaggaagctytattagatacaggagcagatgatacagtattagaagaaatgaatttgccaggaagrtggaaaccaaaaatgatagggggaattggaggctttatcaaagtaagacagtatgatcagatacccctagaaatctgtggccataaggctataggtacagtattagtaggacctacacctgtcaacataattggaagaaatctgttgactcagattggttgcactttaaattttcccattagtcctattgaaactgtacctgtaaaattaaagccaggaatggatggtccaaaagttaaacaatggccattgacagaagaaaaaataaaagcattagtagaaatttgtacagagatggaaaaggaagggaaaatttcaaaaattgggcctgaaaatccatacaatactccagtatttgccataaagaaaaaagacagtactaaatggagaaaattagtagatttcagagaacttaataagagaactcaagacttctgggaagttcaattaggaataccacatccctcagggttaraaaagaagaaatcagtaacagtactggatgtgggtgatgcatatttttcagttcccttagatccagatttcaggaagtatactgcatttaccatacctagtataaacaatgagacaccagggattaggtatcagtacaatgtgcttccacagggatggaaaggatcaccagcaatattccaaagcagcatgacaaaaatcttagagccttttagaaaacaaaatccagaaatagttatctaccaatacdtggatgatttgtakgtargctctgacttagaaatagggcagcatagagcaaaaatagaggaactgagacaacatctgttgaggtggggatttaccacaccagacaaaaagcatcagaaagaacctccattcctttggatgggttatgaactccatcctgataaatggacagttcagcctatagtgctgccagaaaaggacagctggactgtcaatgacatacagaagttagtgggaaaattgaattgggcaagtcagatttatgcagg

SEQ ID NO: 100 - DNA, 1115 bp, Human Immunodeficiency Virus (HIV)
  CDS (1)...(297): HIV Protease
  CDS (298)...(1115): Portion of HIV Reverse Transcriptase
  misc_feature 113, 1112: n = a, c, t or g
  VARIANT 19: Xaa = Leu
  VARIANT 32: Xaa = Leu or Val
  VARIANT 38: Xaa = Leu, Ser, Trp or Stop codon
  VARIANT 43, 45: Xaa = Lys or Thr
  VARIANT 238: Xaa = Thr
  VARIANT 269: Xaa = Pro
  VARIANT 344: Xaa = Arg or Lys
  VARIANT 355: Xaa = Asp or Glu
  VARIANT 370: Xaa = Ser
  VARIANT 371: Xaa = Arg, Gln, Leu or Pro
cctcaaatcactctttggcaacgacccctagtcacaataaagataggagggcagctraaggaagctatattagatacaggagcagatgatacaktattagaagaaatgaattngcccggaagatggamaccaamattgatagggggaattggaggttttatcaaagtaagacagtatgatcagatacccatagaaatctgtggacataaagttataggtacagtattggtaggacctacacctaccaacataattggaagaaatctgatgactcagcttggttgcactttaaattttcccattagtcctattgaaactgtaccagtaaaattaaagccaggaatggatggcccaaaagttaaacaatggccattgacagaagaaaaaataaaagcattagtagaaatttgtacagaattggaaaaggaagggaaaatttcaaaaattgggcctgaaaatccatacaatactccagtatttgccataaagaaaaaagacagtactaaatggagaaaattagtagatttcagagaacttaataagagaactcaagacttctgggaagttcaattaggaataccacatcccgcagggttaaaaaagaaaaaatcagtaacaatactggatgtgggcgatgcatatttttcagttcccttagataaagacttcaggaaagtatactgctttaccatacctagtataaccaatgagacmccagggattagatatcagtacaatgtgctgccacaaggatggaaaggatcaccagcaatattccaaagtagcatgacaaaaatcttagagccytttagaaaacaaaatccagacatagttatctatcaatacgtggatgatttgtatgtaggatctgacttagaaatagggcagcatagagcaaaaatagaggaactgagacaacatctgtggaggtggggattttacacaccagacaaaaaacatcagaaggaacctccattcctttggatgggttatgaactccatcctgataaatggacagtacagcctataargttgccagaaaaagacagctggactgtcaatgamatacagaaattagtgggaaaattaaattgggccagtcagatttckcnggg

SEQ ID NO: 101 - DNA, 1096 bp, Human Immunodeficiency Virus (HIV)
  CDS (1)...(297): HIV Protease
  CDS (298)...(1096): Portion of HIV Reverse Transcriptase
  VARIANT 12: Xaa = Pro or Ser
  VARIANT 15: Xaa = Arg or Ile
  VARIANT 17: Xaa = Gly
  VARIANT 19: Xaa = Leu
  VARIANT 27: Xaa = Glu or Gly
  VARIANT 31: Xaa = Pro or Thr
cctcaratcactctttggcagaccccccttgtcycaataaggakagggggrcagytaaaggaagctttattagayacagragcagatgatmcagtattagaagaaatgtatttgccaggaagatggaaaccaaaaatgatagggggaattggaggttttatcaaggtaagacagtatgatcagatacccatagaaatctgtggacacaaagctataggtacagtattggtaggatctacacctgttaacataattggaagaaatctgttgactcagattggttgcaccttaaattttcccattagttctattgaaactgtaccagtaagattaaagcccggaatggatggcccaaaagttaagcaatggccattaacagaagaaaaaataaaagcattagtagaaatttgtacagaaatggaaaaggaagggaaaatttcaaaaattgggcctgaaaatccatacaatactccagtatttgccataaagaaaaagaacagtgatagatggagaaaagtagtagatttcagagaacttaataagagaacccaagacttttgggaagttcaattaggaataccacatcccgcagggttaaaaaggagaaaatcagtaacagtactggatgtgggtgatgcatacttttcaattcccttagataaagaattcagaaagtatactgcatttaccatacctagtacaaacaatgagacaccagggatcagatatcagtacaatgtgcttccacagggatggaaaggatcaccagcaatattccaaagtagcatgacaaaaatcttagagccttttagagaacagaatccagacatggttatctatcaatacatggatgatttgtatgtaggatctgacttagaaatagggcagcatagagcaaaaatagaggaactgagacaacatctgttgaggtggggattattcacaccagaccaaaaacatcagaaagaacctccattcctttggatgggttatgaactccatccggataaatggacagtacagactatagtgctgccagagaaggacagctggactgtcaatgacatacagaagttagtaggaaaattgaattggg

SEQ ID NO: 102 - DNA, 1048 bp, Human Immunodeficiency Virus (HIV)
  CDS (1)...(297): HIV Protease
  CDS (298)...(1048): Portion of HIV Reverse Transcriptase
  VARIANT 200: Xaa = Glu or Lys
  VARIANT 232: Xaa = Pro
cctcagatcactctttggcagcgacccttygtcacaataaaggtaggggggcaactaaaggaagctctattggatacaggagcagatgatacaatattagaagaaatgtgtttgccaggaagatggaaaccaaaattgatagggggaattggaggttttgtcaaagtaagacaatatgatcagatacccatagaaatctgtggacataaagttataggtacagtattagtaggacctacacctgccaacatagttggaagaaatctgttgactcagattggctgtactttaaattttcccattagtcctattgaaactgtaccagtaaaattaaagccaggaatggatgggccaaaagttaaacaatggccattgacagaagaaaaaataaaagcattagtagaaatttgtacagaattggagaaggatggaaaaatttcaaaaattgggcctgaaaatccatayaatactccagtatttgccataaagaaaaaaaatagtgataaatggagaaaagtagtagatttcagagaacttaataagagaactcaagacttctgggaagtccaattaggaataccacatcccggagggttaragaagaacaaatcaataacagtactggatgtgggtgatgcatatttttcaattcccttagataaagacttcagaaagtatactgcatttaccataccyagtataaacaatgagacaccagggattagatatcagtataatgtgcttccacagggatggaagggatcaccagccatattccaaagtagcatgacaaaaatattagagccttttagaaagcaaaatccagacataattatcgttcaatacgtggatgatttgtatgtagcatctgacttagaaatagggcagcatagaacaaaaataaaggaactaagacaatatctgtgggagtggggattttacacaccagacaaaaaacatcaacaggaacccccattcctctggatggggtatgagctccatcctgataaatggacagtacagcctatagtgctgccagaaaaagaca

SEQ ID NO: 103 - DNA, 1116 bp, Human Immunodeficiency Virus (HIV)
  CDS (1)...(297): HIV Protease
  CDS (298)...(1116): Portion of HIV Reverse Transcriptase
  VARIANT 14: Xaa = Arg or Lys
  VARIANT 15: Xaa = Ile or Val
  VARIANT 134: Xaa = Arg, Ile or Thr
  VARIANT 144: Xaa = Gly
  VARIANT 306: Xaa = Glu or Gln
  VARIANT 340: Xaa = Val
  VARIANT 344: Xaa = Glu or Lys
cctcagatcactctttggcaacgacccctcgtcacaataargrtaggggggcagctaaaggaagctctattagatacaggagcagatgatacagtattagaagaaatgaatttgccaggaagatggaaaccaaaaatgatagggggaattggaggttttatcaaagtaagacagtatgatcagatacccatagaaatctgtggacataaagctgaaggtacagtattagtaggacctacaccggtcaacataattggaagaaatctgttgactcagattggttgcactttaaattttcccattagtcctattgaaactgtaccagtaaaattaaagccaggaatggatggcccaaaagttaaacaatggccactgacagaagaaaaaataaaagcattaabagaaatttgtacagaaatggaaaaggaaggraaaatttcaaaaattgggcctgaaaatccatacaatactccggtatttgccataaagaaaaaagacagtactaaatggagaaaattagtagatttcagagaacttaataagaaaactcaagacttttgggaagttcaattaggaataccacaccccgcagggttaaaaaagaaaaaatcagtaacagtactggatgtgggtgatgcatatttttcagttcccttagataaagaattcaggaagtatacagcatttaccatacctagtacaaacaatgagacacccaggattagatatcagtacaatgtgcttccacagggatggaaaggatcgccagcaatattccaaagtagcatgacaaaaatcttagagccttttagaaaacaaaatccagacatagttatctatcaatatgtggatgatttgtatgtaggatctgacttagagatagggcagcatagaacaaaaatagaggaactgagasaacatctgttgaggtggggatttaccacaccagacaaaaaacatcagaaagaacctccattcctttggatgggttatgaactccatcctgataaatggacagtrcagcctataragctgccagaaaaagacagctggactgtcaatgacatacagaaattagtgggaaaattaaattgggcaagtcagatttacgcagga

SEQ ID NO: 104 - DNA, 1116 bp, Human Immunodeficiency Virus (HIV)
  CDS (1)...(297): HIV Protease
  CDS (298)...(1116): Portion of HIV Reverse Transcriptase
  VARIANT 10: Xaa = Ile or Leu
  VARIANT 63: Xaa = Leu or Pro
  VARIANT 90: Xaa = Leu
  VARIANT 134: Xaa = Ala or Val
cctcagatcactctttggcaacgacccmtygtcacaataaaggtaggggggcaattaaaagaagctctattagatacaggagcagatgatacagtactagaagaaataaatttgccaggaagatggaaaccaaaaatgatagggggaattggaggttttatcaaagtaagacagtatgatcaratacytatagaaatctgtggacataaagctataggtacagtattagtaggacctacacctgtcaacataattggaagaaatctgttractcagattggctgcactttaaattttcccataagtcctattgaaactgtaccagtaaaattaaagccaggaatggatggcccaaaagttaaacaatggccattgacagaagaaaaaataaaagcattagyagaaatttgtacagaaatggaaaaggaaggaaaaatttcaaaaattgggcctgaaaatccatacaatactccagtatttgctataaagaaaaaagacagtactaaatggagaaaattagtagatttcagagaacttaataagagaactcaagacttttgggaagttcaattaggaataccacatccagcagggctaccaaggaaaagatcagtaacagtactggatgtgggtgatgcatatttttcagttcccttagatccagacttcaggaagtatactgcatttaccatacctagtataaacaatgagacaccggggattagatatcagtacaatgtacttccacagggatggaaaggatcaccagccatattccaaagtagcatgacaaaaattttagatccttttagaaaacaaaatccagacataattatctatcaatacgtggatgatttgtatgtagcatctgacttagaaatagggcagcacagaacaaaaatagaagaactaagacaacatctgttgaggtggggattttacacaccagacaaaaaacatcagaaagaacctccatttctttggatgggttatgaactccatcctgataaatggacagtacagcctatagtgctgccagaaaaagacagctggactgtcaatgacatacagaagttagtgggaaaattgaattgggcaagtcagatttatgcaggg

SEQ ID NO: 105 - DNA, 1116 bp, Human Immunodeficiency Virus (HIV)
  CDS (1)...(297): HIV Protease
  CDS (298)...(1116): Portion of HIV Reverse Transcriptase
  VARIANT 36: Xaa = Leu
  VARIANT 283: Xaa = Met or Val
cctcagatcactctttggcaacgacccttcgtcgtcgtaaagataggggggcaactaaaggaagctctattagatacaggagcagataatacagtatttgaagacytgaatttgccaggaaaatggaaaccaaaaatgatagggggaattggaggttttatcaaagtaagacagtatgatcaggtacttgtagaaatctgtggacaaaaagctataggtacagtattaataggacctacacctgtcaacataattggaagggatctgttgactcagattggttgcactttaaattttcccattagtcctattgaaactgtaccagtaaaattaaagccaggaatggatggcccaaaagttaaacaatggccattgacagaagaaaaaataaaagcattagtagaaatttgtacagaaatggaaaaggaagggaaratttcaaaaattgggcctgaaaacccatacaatactccagtatttgccataaagaaaaaagacagtactaartggagaaaattagtagatttcagagaacttaataagagaactcaagacttctgggaagttcaattaggaataccacatcctgcagggttaaaaaagaaaaaatcagtaacagtactggatgtgggtgatgcatatttttcagttcccttagatgaagayttcaggaagtatactgcatttaccatacctagcataaacaatgagacaccaggaattagatatcagtacaatgtgcttccacagggatggaaaggatcaccagcaatattccaatgtagcatgacaaaaatcttagatccttttagaaagcaaaatccagacctagttatctatcaatacrtggatgacttgtatgtaggatctgatttagaaatagggcagcatagaacaaaaatagaggaactgagacarcatctgttgaagtggggatttaccacaccagacaaaaarcatcagaaagaacctccattcctttggatgggttatgaactccatcctgataaatggacagtacagcctatagtgctgccagaaaaggacagctggactgtcaatgacatacagaagttagtgggaaaattgaattgggcaagtcagatttacccaggg

SEQ ID NO: 106 - DNA, 1116 bp, Human Immunodeficiency Virus (HIV)
  CDS (1)...(297): HIV Protease
  CDS (298)...(1116): Portion of HIV Reverse Transcriptase
  misc_feature 16: n = a, c, t or g
  VARIANT 6: Xaa = Arg, Gly or Trp
  VARIANT 9: Xaa = Pro
  VARIANT 18: Xaa = Gln or His
  VARIANT 23: Xaa = Leu or Phe
  VARIANT 26: Xaa = Gln, Lys, Pro or Thr
  VARIANT 31: Xaa = Gln or Pro
  VARIANT 36: Xaa = Ile or Met
  VARIANT 149: Xaa = Ile
  VARIANT 199: Xaa = Leu
cctcagatcactcttnggcaacgaccmattgtcacaataaaggtaggggggcamttaaaagaagttyttttagatmmaggagcagatgatcmagtattagaagaaatrgatttgccaggaagatggaaaccaaaaatgatagggggaattggaggttttatcaaagtaagacagtatgatcaaatagttgtagaaatctgtggacataaagctataggtacagtattagtaggacctacacctgtcaacataattggaagaaatctgttgactcagcttggttgcactttaaattttcccattagtcctattgaaactgtaccagtaaaattaaagccaggaatggatggcccaaaagttaaacaatggccattgacagaggaaaaaataaaagcattggtagaaatttgtacagaaatggaaaaggaaggaaaaatttcaaaaatygggcctgaaaatccatacaatactccagtatttgccataaagaaaaaagacagtactaaatggagaaaattagtagatttcagggaacttaataagagaactcaagacttctgggaagttcaattaggaataccacatcccgcagggytaaaaaagaacaaatcagtaacagtactggatgtgggtgatgcatatttctcagttcccttagataaagactttaggaagtatactgcatttaccatacccagtataaacaatgagacaccagggattagatatcagtataatgtgcttccacaaggatggaaaggatcaccagcaatattccaaagtagcatgacaaaaatcctagagccttttaggaaacaaaatccagacatagttatctatcaatacatggatgatttgtatgtaggatctgacttagaaatagggcagcatagaacaaaaatagaagaactgagagcacatctgttaaagtggggatttaccacaccagayaaaaagcatcagaaagaacctccatttctttggatgggttatgaactccatcctgataaatggacagtgcagcctataaagctgccagaaaaagacagctggactgtcaatgatatacagaagttagtgggaaaattgaattgggccagtcagatttatccagga

SEQ ID NO: 107 - DNA, 1116 bp, Human Immunodeficiency Virus (HIV)
  CDS (1)...(297): HIV Protease
  CDS (298)...(1116): Portion of HIV Reverse Transcriptase
  VARIANT 57: Xaa = Arg or Ser
  VARIANT 201: Xaa = Arg
  VARIANT 248: Xaa = Leu, Ser, Phe or Pro
cctcagatcactctttggcaacgacccctcgtcacaataaagataggggggcaactaaaggaagctttattagatacaggagcagatgatacagtattagaagaaatggaattgccaggaagatggaaaccaaaaatgatagggggaattggaggttttatcaaagtaagmcagtatgatcagatacccatagaaatttgtggacataaagctgtgggtacagtattagtaggacctacacctgtcaacataattggaagaaatctgttgactaagattggttgcactttaaattttcccattagtcctattgaaactgtaccagtaaaattaaagccaggaatggatggcccaaaagttaaacaatggccattgacagaagaaaaaataaaagcattagtagaaatttgtacagaaatggaaaaggaaggaaaaatttcaaaaattggacctgaaaatccatacaatactccagtatttgccataaagaaaaaagacagtactaaatggagaaaattagtagatttcagagaacttaataagagaactcaagacttctgggaagttcaattaggaataccacatcccgcagggttaaaamggaaaaaatcagtaacagtactggatgtgggtgatgcatatttttcagttcccttagataaagagttcaggaagtatactgcatttaccatacctagtataaacaatgagacaccaggaattagatatcagtacaatgtgyytccacagggatggaaaggatcaccagcaatattccaaagtagcatgacaaaaatcttagagccttttagaaaacaaaatccagaaatagttatctatcagtacatggatgatttgtatgtaggatctgacttagaaatagggcagcacagaacaaaaatagaggaactgagacaacatctgttgaagtggggatttaccacaccagacaaaaaacatcagaaagaacccccattcctttggatgggttatgaactccatcctgataaatggacagtacagcctatagtgctaccagaaaaagacagctggactgtcaatgacatacagaagttagtgggaaaattaaattgggcgagtcagatttaygcaggg

SEQ ID NO: 108 - DNA, 1116 bp, Human Immunodeficiency Virus (HIV)
  CDS (1)...(297): HIV Protease
  CDS (298)...(1116): Portion of HIV Reverse Transcriptase
  VARIANT 57: Xaa = Arg or Ser
  VARIANT 58: Xaa = Arg or Gln
  VARIANT 68: Xaa = Glu or Gly
  VARIANT 72: Xaa = Ile or Thr
  VARIANT 78: Xaa = Gly
  VARIANT 88: Xaa = Asn or Ile
  VARIANT 280: Xaa = Cys or Tyr
  VARIANT 304, 333, 363: Xaa = Leu
  VARIANT 367: Xaa = Ser
cctcaaatcactctttggcaacgacccctcgtcacaataaagataggggggcagctaaaggaagctctattagatacaggagcagatgatacagtgttagaagaaatgaatttgccagggaaatggaagccaaaaatgatagggggaattggagggtttatcaaagtaagmcrgtatgatcagatacccatagaaatctgtgracataaagctayaggtacagtattaataggmcctactcctgtcaacataattggaagaawtctgatgactcagattgggtgcactttaaattttcccattagtcctattgaaactgtaccagtaaaattaaagccaggaatggatggcccaaaagttaaacaatggccattgacagaagagaaaataaaagcattagtagaaatttgtacagaaatggaaaaggaagggaagatttcaaaaattgggcctgaaaatccatacaatactccagtatttgctataaagaaaaaagacagtactaaatggagaaaattagtagatttcagagaacttaataagagaactcaagacttctgggaagttcaattaggaataccacatcctgcaggtttaaaaaagaaaaaatcagtaacagtactagatgtgggggatgcatatttttcagttcccttagatgaaaacttcaggaagtatactgcatttaccatacctagtataaacaatgagacaccagggattagatatcagtacaatgtacttccacagggatggaaaggatcaccagcaatattccaatgtagcatgacaaaaatcttagagcctttcagaaagcaaaatccagaaatggttatctrccaatacgtggatgayttgtatgtaggttctgacttagaaatagggcagcatagagcaaaaatagaggaactragacaacatctgttgaggtggggatttaccacaccagacaaaaaacatcagaaagaacctccattcctttggatgggttatgaactmcatcctgataaatggacagtgcagcatatagaactgccagaacaagagagctggactgtcaatgacatacagaagttagtgggaaaaytaaattgggcaagycagatttatgcaggg

SEQ ID NO: 109 - DNA, 1116 bp, Human Immunodeficiency Virus (HIV)
  CDS (1)...(297): HIV Protease
  CDS (298)...(1116): Portion of HIV Reverse Transcriptase
  misc_feature 668, 669, 670, 680, 681, 682, 683, 684, 685, 686, 687, 688, 689, 690,691, 692, 693, 694, 695, 696, 697, 698, 699, 700, 701, 702, 703, 704, 705,706, 707, 708, 709, 710, 711, 712, 713, 714, 715, 716, 717, 718, 719, 720,721, 722, 723, 724, 725, 726, 727, 728, 729, 730, 731, 732, 733, 734, 735,736, 737, 738, 739, 740, 741, 742, 743, 744: n = a, c, t or g
  VARIANT 23: Xaa = Leu
  VARIANT 34: Xaa = Asp or Glu
  VARIANT 51: Xaa = Glu or Gly
  VARIANT 57: Xaa = Asn or Lys
  VARIANT 61: Xaa = Gln or Glu
  VARIANT 63: Xaa = Thr
  VARIANT 220: Xaa = Ala or Asp
  VARIANT 223, 224, 225, 226, 227, 228, 229, 230, 231, 232, 233, 234, 235, 236,237, 238, 239, 240, 241, 242, 243, 244, 245, 246, 247, 248: Xaa = Any Amino Acid
  VARIANT 283: Xaa = Met or Val
  VARIANT 287: Xaa = Leu or Phe
  VARIANT 330: Xaa = Gly
cctcaaatcactctttggcaacgacccatcgtcacagtaaagatagaggggcagctaaaggaagctytattagatacaggagcagataatacagtattggamgaaataaatttgccaggaagatggaaaccaaaaatgatagggggaattgraggttttatcaaagtaaamcagtatgatsagatamccatagacatctgtggacataaagtaataggtacaatattagtaggacctacacctgtcaacataattggaagagatctgttgactcagattggctgcactttaaattttcccattagtcctattgaaactgtaccagtaaaattaaagccaggaatggatggcccaaaagttaaacaatggccattgacagargaaaaaataaaagcattagtagaaatttgtacagaattggaaaaggaaggaaagatttcaaaaattgggcctgaaaatccatacaacactccagtatttgccataaagaaaaaggacagtactaaatggagaaaattagtagatttcagagaacttaataagagaactcaagacttctgggaagttcaattaggaataccacatcctgcagggttaaaaaagaaaaaatcagtaacagtactggatgtgggtgatgcatatttytcagttcccttagmtaaagaatnnnnnnnnnnnnnnnnnnnnnnnnnnnnnnnnnnnnnnnnnnnnnnnnnnnnnnnnnnnnnnnnnnnnnnnnnnnnnccacagggatggaaaggatcaccagcaatattccaaagtagcatgacaaaaatcttagagccttttagaaaacaaaatccagaaatagttatctaccartacrtggatgayttgttwgtaggatctgacttagaaatagggcagcatagaacaaaaatagaggaactgagacaacatctgttgaggtggggatttaccacaccagacaaaaaacatcagaaagaacctccattcctttggatgggytatgaactccatcctgataaatggacagtacagcctatagtgctgccagaaaaagacagctggactgtcaatgacatacagaagttagtgggaaaattgaattgggcaagtcagatttatccaggg

SEQ ID NO: 110 - DNA, 1116 bp, Human Immunodeficiency Virus (HIV)
  CDS (1)...(297): HIV Protease
  CDS (298)...(1116): Portion of HIV Reverse Transcriptase
  VARIANT 1: Xaa = Leu or Pro
  VARIANT 10: Xaa = Leu
  VARIANT 36: Xaa = Ile or Met
  VARIANT 40, 295: Xaa = Gly
  VARIANT 45: Xaa = Ile or Lys
  VARIANT 230: Xaa = Thr
  VARIANT 274: Xaa = Asn or His
  VARIANT 278: Xaa = Val
  VARIANT 349: Xaa = Asp or Glu
cytcagatcactctttggcaacgacccctsgtcacaataaaggtaggggggcaactaaaggaagctctattagatacaggagcagatgatacagtattagaagaaatraatttgccaggraaatggaaaccaawaatgatagggggaattggaggttttatcaaagtaagacagtatgatcagatactcatagaaatctgtggacataaagctataggtacagtattagtaggacctacacctgtcaacataattggaagaaatctgttgactcagattggttgcactttaaattttcccattagtcctattgaaactgtaccagtaaaattaaagccagggatggatggcccaaaagttaagcaatggccattgacagaagaaaaaataaaagcattaatagaaatctgtacagaaatggaaaaggaaggaaaaatttcaaaaattgggcctgaaaatccatacaatactccagtatttgccataaagaaaaaagacagtactaaatggagaaaattagtagatttcagagaacttaataagagaactcaagacttctgggaagttcaattaggaataccacatcccgcagggttaaaaaagaaaaaatcagtgacagtactggatgtgggtgatgcatatttttcagttcccttagatgaagacttcaggaagtacactgcatttmccatacctagtataaacaatgagacaccagggattagatatcagtacaatgtgcttccacaaggatggaaaggatcaccagcaatattccaaagtagcatgacaaaaatcttagagccttttagaaaacaamatccagacatggtyatctatcaatacatggatgatttgtatgtaggatctgacttagaaataggrcagcatagagcaaaaatagaggaactgagacagcatttgttgaagtggggatttaccacaccagacaaaaagcatcagaaagagcctccattcctttggatgggttatgaactccatcctgataaatggacagtacagcctatagagctgccagaaaargamagctggactgtcaatgacatacagaaaatagtgggaaaattgaattgggcaagtcagatttacccaggg

SEQ ID NO: 111 - DNA, 1116 bp, Human Immunodeficiency Virus (HIV)
  CDS (1)...(297): HIV Protease
  CDS (298)...(1116): Portion of HIV Reverse Transcriptase
  VARIANT 57: Xaa = Arg or Ser
  VARIANT 60: Xaa = Asp or Val
  VARIANT 66: Xaa = Ile or Phe
  VARIANT 68: Xaa = Gly
  VARIANT 277: Xaa = Leu
  VARIANT 309: Xaa = Leu or Ser
cctcagatcactctttggcaacgacccctcgtcacaataaagataggggggcaaataaaggaagctctattagatacaggagcagatgatacagtattagaagaaatgagcttgccaggaaaatggaaaccaaaaatgatagggggaattggaggttttatcaaagtaagmcagtatgwtcatatacccatagaawtctgtggmcataaagctgaaggtacagtattaataggacctacacctgtcaacataattggaagaaatctgttgactcagcttggttgcactttaaattttcccataagtcctattgaaactgtaccagtaagactaaaaccaggaatggatgggccaaaagttaagcaatggccactaacagaagaaaaaatcaaagcattgatagaaatttgtacagaaatggaaaaggaaggaaaaattgaaaaaattgggcctgaaaatccatacaatactccagtatttgccataaggaaaaaagacagtactaaatggagaaaattagtagatttcagagaacttaataagagaactcaagacttttgggaaattcaattaggaataccacatcccgcagggttaaaaaagaaaaaatcagtaacagtactggatgtgggtgatgcatatttttcagttcccttagataaagacttcaggaagtatactgcatttaccatacctagtgtaaataatgagacaccaggaattagatatcaatacaatgtgcttccacaaggatggaaaggatcaccagcaatattccaaagtagcatgacaaaaatcttagagccttttagaaaacaaaatccagaaytagttatctaccaatacatggatgatttgtatgtaggatcagacttagaaatagaraagcatagagcaaaaatagaggaactgagagaacatctgtyaaaatgggggtttaccacaccagacaaaaaacatcagaaagaacctccatttctttggatgggttatgaactccatcctgataaatggacagtacagaccataaagctgccagaaaaagacagctggactgtcaatgatatacagaagttagtgggaaaattgaattgggcaagtcaaatttatccaggg

SEQ ID NO: 112 - DNA, 1116 bp, Human Immunodeficiency Virus (HIV)
  CDS (1)...(297): HIV Protease
  CDS (298)...(1116): Portion of HIV Reverse Transcriptase
  VARIANT 46: Xaa = Ile or Met
  VARIANT 140: Xaa = Leu or Met
  VARIANT 171: Xaa = Arg or Lys
  VARIANT 238: Xaa = Thr
  VARIANT 313: Xaa = Leu or Phe
  VARIANT 314: Xaa = Ser or Tyr
  VARIANT 323: Xaa = Gln or Glu
  VARIANT 334: Xaa = His or Pro
  VARIANT 363: Xaa = Leu
cctcagatcactctttggcaacgacccctcgtcacaataaagataggggggcagctaaaggaagctctattagatacaggagcagatgatacagtattagaagaaatgaatttgccaggaagatggaaaccaaaaatkatagggggaattggaggttttatcaaagtaagacagtatgatcagatacttgtagaaatttgtggacataaagctataggtacagtattagtaggacctacacctgtcaacataattggaagaaatctgttgactcagattggttgcactttaaattttcccattagtcctattgagactgtaccagtaaaattaaagccaggaatggatggcccaaaagtcaaacaatggccattgacagaagaaaaaataaaagcattaatggaaatttgtgcagaawtggaaaaggaaggaaaaatttcaaaaattgggcctgaaaatccatacaatactccagtatttgccataaagaaaaaagacagcactaaatggaraaaattagtagatttcagagaacttaataaragaactcaagacttttgggaagttcaattaggaataccacatcccgcagggttaaaaaagaaaaaatcagtaacagtactagatgtgggtgatgcatatttttcagttcccttagatgaagacttcaggaagtatactgcatttaccatacctagtataaacaatgagacmccagggattagatatcagtacaatgtgcttccacagggatggaaaggatcaccagcaatattccaaagtagcatgacaaaaattttagagccttttagaaaacaaaatccagacatagttatctatcaatacatggatgatttgtatgtaggatctgacttagaaatagggcagcatagaacaaaaatagaggaactgagacagcatctgttgaagtggggattktmcacaccagacaaaaaacatcagaaasaacctccattcctttggatgggttatgaactccmtcctgataaatggacagtacaacctatagtgctgccagaaaaggacagctggactgtcaatgacatacagaagttagtgggaaaattraattgggcaagtcagatttacgcaggg

SEQ ID NO: 113 - DNA, 1116 bp, Human Immunodeficiency Virus (HIV)
  CDS (1)...(297): HIV Protease
  CDS (298)...(1116): Portion of HIV Reverse Transcriptase
  VARIANT 126: Xaa = Thr
  VARIANT 143, 152: Xaa = Asp or Glu
  VARIANT 144: Xaa = Arg or Gly
  VARIANT 145: Xaa = Lys or Stop codon
  VARIANT 149: Xaa = Ile or Leu
  VARIANT 152: Xaa = Asp or Glu
  VARIANT 261: Xaa = Cys or Ser
cctcagatcactctttggcaacgacccctcgtcacaataaagataggggggcaactaaaggaagctctattagatacaggagcagatgatacagtattagaagaaatgaatttgccaggaaaatggaaaccaaaaatgatagggggaattggaggttttatcaaagtaagacagtatgatcagatactcatagaaatctgtggacataaaactataggtacagtattaataggacctacacctgtcaacataattggaagaaatctgttgactcagcttggttgtactttaaattttcccattagtcctattgaaactgtaccagtaaaattaaagccaggaatggatggtccaagagttaaacaatggccattgacmgaagaaaaaataaaagcattaatagaaatctgcacagaaatggaaaaggamsgawaaatttcaaaamtagggcctgamwatccatacaatactccagtatttgccataaagaaaaaagacagtactaaatggagaaaattagtagatttcagagaacttaataagagaactcaagacttctgggaagttcaattaggaataccacacccggcagggttaaaaaagaacaaatcagtaacagtgttggatgtgggtgatgcatatttttcagttcccttagataaagagttcaggaagtatactgcatttaccatacctagtataaacaatgagacaccagggatcagatatcagtacaatgtgcttccacagggatggaaaggatcaccagcaatattccaatstagcatgacaaaaatcttagagccttttagaaaacaaaatccagaaatagttatctgtcaatacatggatgatttgtatgtaggatctgacttagaaatagggcagcatagaacaaaaatagaggaattgagagaacatctgttgaagtggggatttaccacaccagataaaaaacatcagaaagaacctccattcctttggatgggttatgagctccatcctgataaatggacagtacagcctatagtgctgccagaaaaagacagctggactgtcaatgacatacagaagttagtgggaaaattgaattgggcaagtcagatttatgcaggg

SEQ ID NO: 114 - DNA, 1116 bp, Human Immunodeficiency Virus (HIV)
  CDS (1)...(297): HIV Protease
  CDS (298)...(1116): Portion of HIV Reverse Transcriptase
  misc_feature 35, 39, 40, 171: n = a, c, t or g
  VARIANT 1: Xaa = His or Pro
  VARIANT 3: Xaa = Ile
  VARIANT 4: Xaa = Asn or Thr
  VARIANT 8: Xaa = Arg, Gln or Lys
  VARIANT 12: Xaa = Arg, Gln, Leu or Pro
  VARIANT 13: Xaa = Asn, Ile, Lys or Met
  VARIANT 14: Xaa = Ala, Asp, Asn, Gln, Glu, His, Lys, Pro, Ser, Thr, Tyr or Stop codon
  VARIANT 15: Xaa = Gly or Val
  VARIANT 31: Xaa = Pro or Thr
  VARIANT 37: Xaa = Asn or Tyr
  VARIANT 57, 350: Xaa = Arg or Ser
  VARIANT 78: Xaa = Gly
  VARIANT 230: Xaa = Ser
  VARIANT 276: Xaa = Glu or Lys
  VARIANT 281: Xaa = Gln or Pro
  VARIANT 283: Xaa = Leu or Met
  VARIANT 352: Xaa = Ala or Thr
  VARIANT 353: Xaa = ala or Ser
cmtcaaatmamtctttggcarmracccctagtccnaawnnmmgkkaggggggcaaataaggaagctctattagacacaggagcagatgatmcagtattagaagaaatgwatttaccaggaaaatggaaaccaaaaatgatagggggaattggaggttttatcaaagtaagncagtatgagcagatacccatagaaatctgtggacataaagctataggtacagtattggtaggmcctacacctgtcaacataattggaagaaatctgttgactcagattggttgcactttaaattttcccattagtcctattgaaactgtaccagtgaaattaaagccaggaatggatggcccaaaagttaaacaatggccattaacagaagaaaaaataaaagcattagtagaaatttgtacagaaatggaaaaagaagggaaaatttcaaaaattgggcctgaaaatccatacaatactccagtatttgccataaagaaaaaagacagtactaaatggagaaaattagtagatttcagagaacttaataagagaactcaagacttctgggaagtccaattaggaataccacatcctgcagggttaaaaaagaaaaaatcagtaacagtgctggacgtgggtgatgcatatttttcagttcccttagataaagacttcaggaagtatactgcattttcyatacctagtacaaacaatgagacaccagggagtaggtatcaatacaatgtgcttccacagggatggaaaggatcaccagcaatattccaaagtagcatgataaaaatcttagagccttttagaaaacaaaatccaraaattgtgatctatcmatacmtggatgatttgtatgtaggatctgacttagaaatagaacagcatagaacaaaaatagaggaactgagacaacatctgttgaggtggggatttaccacaccagacaagaaacatcagaargaacctccgttcctttggatgggttatgaactccatcctgataaatggacagtacagcctatagtgctgccagaaaaagacagsttgrctkcaaatgacatacagaagttagtgggaaaattgaattgggcaagtcagatttactcaggg

SEQ ID NO: 115 - DNA, 1116 bp, Human Immunodeficiency Virus (HIV)
  CDS (1)...(297): HIV Protease
  CDS (298)...(1116): Portion of HIV Reverse Transcriptase
  VARIANT 62: Xaa = Gly or Val
  VARIANT 74: Xaa = Pro or Thr
  VARIANT 75: Xaa = Val
  VARIANT 78: Xaa = Gly
cctcagatcactctttggcaacgacccctcgtcacaataaagataggggggcagctaaaggaagctctaatagatacaggagcagatgatacagtgttagaagaaatgagtataccaggaaaatggaaaccaaaattgatagggggaattggaggttttatcaaagtaagacagtatgatcaggkgcccgtagaaatttgtggacataaagctataggtmcagtwttaataggmcctacacctgccaacataattggaaggaatctgttgactcagattggttgcactttaaattttcccattagtcctattgaaactgtaccagtaaaattaaagccaggaatggatggcccaaaagttaagcaatggccattgacagaagagaaaataaaagcattaacagaaatttgtacagaaatggaaaaggaaggaaagatttcaaaaattgggcctgaaaatccatacaatactccagtatttgccataaagaaaaaagacagtactaaatggagaaaattagtagatttcagagaacttaataagagaactcaagatttctgggaagttcaattaggaataccacatcctgcagggttaaaaaagaaaaaatcagtaacagtactggatgtgggtgatgcatatttttcagttcccttagatgaagactttaggaaatatactgcatttaccatacctagtgtaaacaatgagacaccagggattagatatcagtataatgtgcttccacagggatggaaaggatcaccagcaatattccaatgtagtatgacaaaaatattagagccctttagaaaacaaaatccagacctagttatctatcaatacgtggatgatttgtatgtaggatctgacttagaaatagggcagcatagaacaaaaatagaggaactgagacaacatctgttgaaatggggttttaccacaccagacaaaaagcatcagaaagaacctccattcctttggatgggttatgaactccatccagataaatggacagtacagcctatagtgctgccagaaaaagacagctggactgtcaatgacatacagaagttagtgggaaaattaaattgggcaagtcagatttacccaggg

SEQ ID NO: 116 - DNA, 1116 bp, Human Immunodeficiency Virus (HIV)
  CDS (1)...(297): HIV Protease
  CDS (298)...(1116): Portion of HIV Reverse Transcriptase
  VARIANT 78: Xaa = Gly
cctcagatcactctttggcaacgacccctcgtcacaataaagataggggggcagctaaaggaagctctattagatacaggagcagatgacacagtattagaagaaataagtctgccaggaagatggaaaccaaaattgatagggggaattggaggttttatcaaagtaaagcagtatgatcagatacccatagaaatctgtggacataaagctataggtacagtattagtaggmcctacacctgtcaacatagttggaagaaatctgttgactcagcttggttgcactttaaattttcccattagtcctattgaaactgtaccagtaaaattaaagccaggaatggatggcccaaaggttaagcaatggccattgacagaagaaaaaataaaagcattagtagaaatttgtacagaattggaaaaggaagggaaaatttcaaaaattgggcctgaaaatccatacaatactccagtatttgccataaagaaaaaagacagtacaaaatggagaaaattagtagatttcagagaacttaataagagaactcaagacttttgggaagttcaactagggataccacatcccgcagggttaaaaaagaaaaaatcagtaacagtactggatgtgggtgatgcatatttttcagttcccttggataaagacttcaggaagtacactgcatttaccatacctagtataaataatgagacaccagggattagatatcaatacaatgtgcttccacagggatggaaaggatcaccagcaatattccaaagtagcatgacaaaaatcttagagccttttagaaaacaaaatccagacatagttatctatcaatacgtagatgacttgtatgtaggatctgacttagaaatagggcagcatagaacaaaaatagaggaactgagacaacatctgtggaagtgggggttttacacaccagataaaaaacatcagaaagaacctccattcctttggatgggttatgaactccatcctgataaatggacagtacagcctatagtgctgccagaaaaggacagctggactgtcaatgacatacagaagttagtgggaaaattaaattgggcaagtcagatttacccaggg

SEQ ID NO: 117 - DNA, 1119 bp, Human Immunodeficiency Virus (HIV)
  CDS (1)...(297): HIV Protease
  CDS (298)...(1119): Portion of HIV Reverse Transcriptase
  VARIANT 371: Xaa = Pro or Ser
cctcaaatcactctttggcaacgacccatcgtcacaataaagataggggggcaactaaaggaagctctattagatacaggagcagatgatacagtattagaagaaatggatttgccaggaagatggacaccaaaaatgatagggggaattggaggtcttgtcaaagtaagacagtatgatcagatacccatagaaatctgtggacataaaactataggtacagtattagtaggacctacacctgccaacataattggaagaaatctgttgactcagcttggttgtactttaaattttcccattagtcctattgaaactgtaccagtaaaattaaagccaggaatggatggcccaaaagttaaacaatggccattgacagaagaaaaaataaaagcattagtagaaatttgtacagaattggaaaaggaaggaaaaatttcaaaaattgggcctgaaaatccatacaatactccagtgtttgccataaagaaaaaagacagtactaaatggagaaaattagtagatttcagagaacttaataagagaactcaagacttctgggaagttcaattaggaataccacatcctgcaggattaaaaaagaaaaaatcagtaacagtactggatgtgggtgatgcatatttttcagttcccttagacaaggactttaggaaatatactgcatttaccatacctagtacaaacaatgagacaccagggattagatatcagtacaatgtgcttccacagggatggaaaggatcaccagcaatattccaaagcagcatgacaaaaatcttagatccttttagaaagcaaaatccagacatagttatctgtcaatacatggatgatttgtatgtaggatctgacttagaaatagggcagcatagaacaaaaatagaggaactgagagaacatctgtggaagtgggggttttacacaccagacaaaaaacatcagaaagaacctccgttcctctggatgggttatgaactccatcctgataaatggacagtacagcctatagtgctgccagaaaaagacagctggactgtcaatgacatacagaagttagtgggaaaattgaactgggcaagtcagatttatycagggatt

SEQ ID NO: 118 - protein, 979 aa, Human Immunodeficiency Virus
PISPIETVPVKLKPGMDGPKVKQWPLTEEKIKALVEICTEMEKEGKISKIGPENPYNTPIFAIKKKDSTKWRKLVDFRELNKRTQDFWEVQLGIPHPAGLKQKKSVTILDVGDAYFSVPLDEGFRKYTAFTIPSRNNETPGIRYQYNVLPQGWKGSPAIFQSSMTRILEPFRKQNPEIVIYQYMDDLYVGSDLEIGQHRAKIEELRGHLLKWGFTTPDKKHQKEPPFLWMGYELHPDKWTVQPIKLPEKDSWTVNDIQKLVGKLNWASQIYAGIKVRQLCKLLRGTKALTEVIPLTEEAELELAENREILKEPVHGVYYDPSKDLIAEIQKQGQGQWTYQIYQEPFKNLKTGKYARMRGAHTNDVKQLTEAVQKITTESIVIWGKTPKFKLPIQKETWETWWTEYWQATWIPEWEFVNTPPLVKLWYQLEKEPIVGAETFYVDGAANRETKLGKAGYVTNRGRQKVVTLTDTTNQKTELQAIYLALQDSGLEVNIVTDSQYALGIIQAQPDQSESELVNQIIEQLIKKEKVYLAWVPAHKGIGSPIETVPVKLKPGMDGPKVKQWPLTEEKIKALVEICTEMEKEGKISKIGPENPYNTPIFAIKKKDSTKWRKLVDFRELNKRTQDFWEVQLGIPHPAGLKQKKSVTILDVGDAYFSVPLDEGFRKYTAFTIPSRNNETPGIRYQYNVLPQGWKGSPAIFQSSMTRILEPFRKQNPEIVIYQYMDDLYVGSDLEIGQHRAKIEELRGHLLKWGFTTPDKKHQKEPPFLWMGYELHPDKWTVQPIKLPEKDSWTVNDIQKLVGKLNWASQIYAGIKVRQLCKLLRGTKALTEVIPLTEEAELELAENREILKEPVHGVYYDPSKDLIAEIQKQGQGQWTYQIYQEPFKNLKTGKYARMRGAHTNDVKQLTEAVQKITTESIVIWGKTPKFKLPIQKETWETWWTEYWQATWIPEWEFVNTPPLVKLWYQLEKEPIVGAE

What is claimed is:

1. A computer-based method of selecting drug therapies for subjects based on genetic polymorphisms, comprising:
obtaining amino acid sequences of a target protein that is the product of a gene exhibiting genetic polymorphisms, wherein the sequences represent different genetic polymorphisms;
generating 3-D protein structural variant models from the sequences;
computationally docking drug molecules with the target protein models;
energetically refining the docked complexes;
determining the binding interactions between the drug or potential new drug candidate molecules and the models; and
selecting drug therapies based on the drug or drugs that have the most favorable binding interactions with the structural variant models.

2. The method of claim 1, wherein the binding interactions are determined by:
calculating the free energy of binding between the protein structural variant and the docked drug molecule; and
decomposing the total free energy of binding based on the interacting residues in the protein active site.

3. A computer-based method for predicting clinical responses in subjects based on genetic polymorphisms, comprising:
obtaining one or more amino acid sequences for a target protein that is the product of a gene exhibiting genetic polymorphisms;
generating 3-D protein structural variant models from the sequences;
building a relational database of protein structural variants derived based on genetic polymorphisms and observed clinical data associated with particular polymorphisms exhibited in the subjects, wherein the database comprises:
3-D molecular coordinates for the structural variant models;
a molecular graphics interface for 3-D molecular structure visualization;
computer functionality for protein sequence and structural analysis;
database searching tools; and
observed clinical data associated with the genetic polymorphisms, subject medical history and subject history associated with the genetic polymorphisms;
obtaining a target protein structural variant based on the same gene associated with a polymorphism in a subject;
generating a 3-D protein model based on the subject's gene sequence;
screening/comparing the 3-D model derived from the subject to the structures contained in the database by:
identifying structures in the database that are similar to the model derived from the subject; and
predicting a clinical outcome for the subject based on the clinical data associated with the identified structures.

4. A computer-based method for designing therapeutic agents that are active against biological targets that have become drug resistant due to genetic mutations, comprising:
obtaining a first 3-D protein structural variant model of a target protein against which a given drug has biological activity;
generating a second 3-D protein structural variant model of the target in which genetic mutations have occurred and against which the same drug is no longer biologically active;
comparing the structures of the first and second model to identify structural differences; and
performing structure-based drug design calculations in order to identify new drugs or modifications to the existing drug to bring about biological activity against the second model.

5. A computer-based method for identifying compensatory mutations in a target protein, comprising:
obtaining the amino acid sequence of a target protein containing multiple amino acid mutations that is expressed in a subject, wherein the structure of a form of the target protein that responds to a particular drug, including the active site, has been structurally characterized;
generating a 3-D structural model of the mutated protein;
comparing the structure of the mutated protein with the form of the protein that responds to the drug to identify structural differences and/or similarities arising from the mutations;
comparing the biological activities of the drug against both the mutated protein and the form of the protein that responds to the drug to determine the effects of the mutations on drug response; and
identifying the mutations in the protein that affect biological activity based on the comparisons.

6. A method for creating a 3-D structural polymorphism relational database, comprising:
obtaining one or more amino acid sequences of a target protein that is the product of a gene exhibiting a genetic polymorphism, wherein sequences represent different genetic polymorphisms;
generating 3-D protein structural variant models from the sequences;
energetically refining the models;
evaluating the quality of the models;
optionally obtaining associated clinical properties or data; and
inputting the model and any associated properties and/or data into a relational database.

7. The method of claim 6, wherein after energetically refining the models, the models are further refined.

8. The method of claim 6, wherein the database comprises amino sequences of two or more polymorphic variants.

9. The method of claim 6, wherein the database comprises amino sequences of ten or more polymorphic variants.

10. The method of claim 6, wherein the database comprises amino sequences of about 100 or more polymorphic variants.

11. The method of claim 6, wherein the database comprises amino sequences of about 1000 or more polymorphic variants.

12. The method of claim 6, wherein the database comprises amino sequences of more than 8000 polymorphic variants.

13. A database created by the method of claim 6.

14. The database of claim 13, comprising variant 3-dimensional structures of a selected target.

15. The database of claim 13 that comprises structures of proteases or polymerases.

16. The database of claim 13, wherein the proteases are viral proteases or polymerases.

17. The database of claim 13, wherein the viral proteases are human immunodeficiency virus proteases and the polymerase is a viral reverse transcriptase.

18. The method of claim 6, wherein quality is assessed by computing the normalized residue energies such that if eₐᵥ is≧1.5 a model is further refined until eₐᵥ is <1.5; if eₐᵥ is <1.5 a model is deposited into the database.

19. A computer system, comprising a database containing data representative of the three dimensional structure of polymorphic variants of a drug target.

20. The system of claim 19, wherein the target is a cell surface receptor or an enzyme.

21. The system of claim 19, wherein the enzyme is a protease or a polymerase.

22. A database, comprising:
sequences of nucleotides encoding a protein or portions thereof, wherein proteins comprise polymorphic variants; and the portions encode a domain of the protein that comprises a site in the protein that binds to a drug candidate; and
the coordinates of 3-dimensional (3-D) structures of the encoded proteins or portions thereof.

23. The database of claim 22 that is a relational database.

24. The database of claim 22 that comprises at least 2 polymorphic variants and the corresponding 3-D structures.

25. The database of claim 24 that comprises more than 10, more than 100, more than 1000, more than 8000, or more than 10,000 polymorphic variants and the corresponding 3-D structures.

26. The database of claim 22, wherein the protein is a receptor or enzyme from a eukaryotic or prokaryotic organism.

27. The database of claim 22, wherein the organism is a pathogen or a mammal.

28. The database of claim 22, wherein the organism is a pathogen is a virus or bacterium and the mammal is a human.

29. The database of claim 22, wherein the protein is a protease or a reverse transcriptase.

30. A database, comprising the sequences of nucleotides set forth in SEQ ID Nos. 3-117 that encode HIV protease or the portion of HIV reverse transcriptase set forth in each SEQ ID.

31. The database of claim 22, further comprising 3-D structural coordinates for a protein or portion thereof comprising sequences of amino acids encoded by each of SEQ ID Nos. 3-117.

32. The database of claim 23, wherein the protein is HIV protease.

33. The database of claim 23, wherein the protein is HIV reverse transcriptase.

34. A method for predicting clinical responses in subjects based on a genetic polymorphism, comprising:
comparing a three-dimensional (3-D) model of a structure of a protein from a biological sample from a subject to 3-D structures contained in a database;
identifying a structure in the database that is similar to the model of a protein from the subject; and
predicting a clinical outcome for the subject based on the clinical data associated with the identified structures.

35. The method of claim 34, wherein:
the clinical outcome is the efficacy of a treatment; and
the efficacy of a particular treatment for subjects who have the protein in the database is known.

36. The method of claim 34, wherein the protein is an human immunodeficiency virus (HIV) protein.

37. The method of claim 36, wherein the HIV protein is a protease or reverse transcriptase.

38. The method of claim 34, wherein the primary sequence of the target protein is deduced from the sequence of a gene obtained from a subject sample.

39. The method of claim 34, wherein the subject is a human.

40. The method of claim 34, wherein the protein is encoded by gene that has a plurality of polymorphisms.

41. A method for predicting resistance or susceptibility to a particular drug therapy, comprising:
generating a 3-D structural model of a target protein from a subject;
performing protein-drug binding analyses in silico; and
predicting drug sensitivity or resistance based on the protein-drug binding analyses.

42. The method of claim 41, wherein the protein is an HIV protein.

43. The method of claim 42, wherein the HIV protein is a protease or reverse transcriptase.

44. The method of claim 41, wherein the primary sequence of the target protein is deduced from the sequence of a gene obtained from a subject sample.

45. The method of claim 41, wherein the subject is a human.

46. A method for predicting clinical responses in subjects based on genetic polymorphisms, comprising:
comparing a 3-D model of the structure of a protein from biological sample from a subject to 3-D structures contained in a database of claim 38;
identifying structures in the database that are similar to the model of the protein from the subject; and
predicting a clinical outcome for the subject based on the clinical data associated with the identified structures.

47. The method of claim 46, wherein the subject is a human.

48. A computer-based method of selecting drug therapies for subjects based on a genetic polymorphism, comprising:
determining the amino acid sequence of a protein from a biological sample from a subject;
identifying a structural variant model with the same amino acid sequence or similar 3-dimensional (database) structure in a database of three-dimensional structural variants;
selecting a drug therapy for the subject based on the drug or drugs that have the most favorable binding interactions with the structural variant model that corresponds to the protein in the subject sample.

49. The method of claim 47, wherein the protein is encoded by gene that has a plurality of polymorphisms.

50. A computer-based method of selecting drug therapies for subjects based on a genetic polymorphism, comprising:
determining the amino acid sequence of a protein from a biological sample from a subject;
identifying a structural variant model with the same amino acid sequence or the same or similar 3-dimensional (3-D) structure in a database of claim 13;
selecting a drug therapy for the subject based on the drug or drugs that have the most favorable binding interactions with the structural variant model that corresponds to the protein in the subject sample.

51. The method of claim 50, wherein the subject is a human.

52. The method of claim 50, wherein the protein is encoded by gene that has a plurality of polymorphisms.

53. The method of claim 1, wherein a subject is a human.

54. The method of claim 3, wherein a subject is a human.

55. The method of claim 5, wherein a subject is a human.

56. The method of claim 48, wherein the subject is a human.
